United States Patent Application Publication US 2007/0054278 A1 - sequence listing, part 75

SEQ ID NO: 96097 - DNA, 67088 bp, Homo sapiens
  misc_feature (1)...(67088): n = A,T,C or G
tacataaagtaggtgttaaagcacaaactaaccagactgcctgggtttaaattctggctctgccacttattaagtgtgtgaccttgagaaggttgcttagtcaatttgtgcttcaattctctaagaagggatggtaatcctttctacctctgaagaattattgttaagtatatctctcatggagtaagtgctaaataagaattggttataattatgtgttggtctcccccatgagattgtgagcaactttaaggcgaggactttggctttttcatttctctggaatattaagtattcagtaagtgttactgaatgaataactggtgagacagctctatgatgatgggagggattacccagtttccttctttgagcagatcctacacttttttttttttttttaattgagacggagtctcgctctgtcacccaggctggagtgcagtggcacaatctcggctcactgcaagctccgcctcccaggttcacgccattctcctgcctcagcctccagagtagctgggactacaggcgcccaccaccacgcccggccaattttttttttttgtatttttagtagagacggggtttcaccatgttagccaggatggtctcaatctcctgacctcgtgatccgcctgccttggcctcccaaagtgctgggattacaagcgtgagccaccacacacccggccagatcctacacattttaaaaaaaattgtattgtttccaattttgtggctccagttttgtttaattcaaaccaaaatcctgaaaacatcacaatcatataattgaaattcaacaaaatgaaaccaattttaaaaaatcataaaatgcatgttcattctaagaaacttaactccatttttaagctttaagattcccccgatcccaaataacctaacacaccaaaagccttgccatttcacacatgctgttcctttgcttagaaccttttcaatgtctagctcactctgtttgggacttcttttttcttttcttttttttgagacagggtctggctctgtcatccaggctggagtgcaatggggcaatttcggctcactgcaacctccgcccttccaggctcaagcgttcctcccacctcagtctctcgaatagctgggactacaggcatgcggcaccacgcccagctaacttttgtattgtttgtagagacagggtttcgccatgttggccaggctggtctcaaactcctgagatcaaacaatccgcctgcctaggcctcccaaggtgctgggattacaggtgagagacattgtgcctggcctctttgggaagttttttctgatcttagggtgaggcagatgcctcttctgtgctgccaaaacagcctatacatacaacaatatggtaccaataatgcatcatcccaactgtgatgctctgttaccacacttaaggcagatattgcaattatttggctcccctgctttactgcaagctccttgacatcagggcagtatctcagtcattactgaatgtctgacatttagttgatacttgatgagtttttgaatgaataaatgtttaaacaggtaagttttattttgcttatcaattttttgtttatttcaatcatggcaacttttatatagtggttggaaattaaaattaaaattaaaatttaaagcattttcccatacattatacaactgatctcacaaccaccctgagataggtatttttattatcctcattttgcaaatgaagaaacaggttcagtggctgacttccccaaaactgcttatcttgtaagtagaagctgagactcttgattcaaagccctaagtttcagtttgtgtaaaccagacaacactcttctgaatatgactattagctgaagtgcccctttggaacattctaagcctcctagagtcacctttttcatgaatctaaaagctctcatcattctcttactgctccatcttgcaggaagaatgtccagtcccttccctaaatccccttccatctgctaactccccactgtccaccagagcatgcctcttctaatacttcagattcaaagtggggatggaactcatctctaaaaacgactgcatgcatctcatatagacaaaagaaaatctggttaattctttaatcttcaaattttattttgaaaactattttaaattcaaagacagagtagtataaaaaccacccacgtccccaacactctcaaataaccaatgttgtaattaactttctatgtactattttggggctctgtttttagatcatcatcaacttcttcacagttcattcttcttaaatacacatggctaaggagtgagaccctgccgcttcctccccagtatcagtctcttccatgccacatctgaaaacagcggtcattgacccttctttcgtccaatttcctttccatatgttcagcatgcaatctttggtgctgatcaagaggaaccccatcccatatcagcacagggatatattggcagtggtcttcatggcaagtatacccactccttcctaattataaattatgaaactctctataaaggtgagggtttgcttttgttttcatgtgtttggctgctgtaaatcaatccatcagaggctgggcaacaacattaacatgaacaaagtatgaaaaatagcccaccatgatacagtaagtatttaataaggacaaacctaaaatagcagcccagttaatcaaataattttaaatcagcccaatgcaaaacactcccctttcctctacctggcaattcttaccaacctgagtaatgtgaacagagaacatgagtccatgaatcaccayaggccatccccaggcagagtgaggcacacacagctgtgatcaaatgttgccttctctcgttttaaacaaggaattaactgtacanggtgattatctctggggagtgggagtcaaaatgactttcatttttgtattttatgtacttcaatacaggctgaatttttcaaagagcatggattttataataaaaaacatttccattttgagaaaaaatagacacgagtaacccttaatttggttcacataagaatatgagaaaaaataatttcaccattttagcatgagatactagcacagaagaaaatgtcaggagaaaacattctatagagaccaaagtgacctctcaagaagatgtttctcaaatatacctcattttttttgggaagacaacagattgcagcttattaacaaaaatctatggaaatttttctgtatttctataccaaatagtttcctctcctttgcaccaaaggcttagtgcttttcctggctagagggcaagtctgaaagcaggtacttcttttctcctgcacattagaaagggaaatgatgctacaaagaaaacgagatactcttaaaaaggtcgatgaactatatcttccccagagcctggcaaaagaggagaatgaggaagcagtacaaaaatttagaagtgttaaactgaaatcaaagcacaaggtcaagagcaagtggctgtgactgtgctcatgccctgctaaggccctggttaaatatggtttctcttttctctgacaatgatacaccagtcccttccccacaaaaaccccaaaaaagtaggccatcgtattaggagtgggaagaatagaaaggcttcaggaaagactgttcaacctgagttattcaataccatgaaaatgtggtattaatggagaaagcctgcttgctcataaaacgaatgtaagaggttaactgaagactctactgtagacgttatgtttattaacctttggaaaagcatttcacctctactatgcttcagtttcctgtttttgttgttgttgttgtttgtttttttgagacagagtctcgctcttgttgcccaggctggagtgcagtggcgccatttcggctcactgcaacctccgcctcccaggttcaagcgattctcctgcctcagcctcctgagtagctgggattacaggcgcccgccaccacgccaggctaatttttgtacttttagtagagatggggtttcgccatgttggccaggctggtctcgaactcctgacctcgggtgatccacccgcctcggcctcccaaagtgttgggattacaggcgtgagccactgcgcccggcccagtttcctgtttctttaagaggaggaaccccctttctagctcccaaagtcatccagttattattgagactttattagatatccagcaagtgattcaaaagcaaagttttgaggttctgagcaaatgttggccagccatcattcaagcctcatctttttgtactcaattttccccgtttctccacatcatatctatctgcactgacaaaatttcatagaatctaatttctccgtttcaaagaaggctgtgattgctctgtaaattatgagacctgcatccttcaccaaatctgcttcagagacattgatcctacgttgcctcaaaaagcctcggaccactccttgggttcgagtgtcaaagggaacactatttcttgtactgatacataccgtatggaaatacactaacaccaatgaagaatctgcgtgcactgccacactgaaattcgacttaagaacgttatcacacacaaatgtcctatccccagaaaacgtcaaggattttcatcaacctcttcctgattcgcccaatttagaaaatgtcatgtcaacccttcagatcatgtacacgcgttgcttaggtagaaagggagactgggtggggtggctgagctcagaccctgcctacatactttagtagtaacgactcccgatctgcatccaacacatttaccgaacttctagtaagcgcccaccgctgcaagcgaaagcactcccttcccaagaaacagatcttttccacttaaaattcccaaactcagaccttccactttttactgaacaaaaagcgtgtgtgccggcgagagggggtgggaaacagcgtaacaagaatttgcacggatcttacgcctcctccctcggagcgcgcccaagtctgcagcctcgggctccgggacacttcccctcccacccgccgccgagccgcagctgtaagttgagagaagcgggctctaggcacgtcaatcaaccgggttctcccgcctcccgtctacacctcccctcccccctcgaaaaaaataaaggcagagaaagaaagaaaagaaggtaactaatttgggaactagtctccgtaggggcttcgcctccgactcagggaggccgcacgcccgggacctgacgcgccggcaacaagcaggcggcctggcagccgcccgtcaccgggtcctcgcagcgcgtccgccgcgctccggctccccgcacggatcggcgcccctccggccccgcastccgccaggcccgcggcccgtcgccctccggcctgggccaaagttgcgcaaatagccccacaactggcaaatacttaccggccgcaacaggaaccagagctgcggagattttagggagtttaaggcaaatcagccgcgggaaaggcgggcgaaggcgaaggggccgcgagctgcagtggcggcggcgcgcggcgctcggcgctcgggctgggctgcgcggagaggctctggctctgccagggactgtgctgcaacaaaggacttccgctgccgcacagccgcgcctgccgcaccgcactgagccggccccgcttacgcggcgactccgggtctgcccaccagttcgctgcggcgtccgccagccttcccctccctctcgcccgcccacccactctgccgctggctgctaggggcacccgcggtcgcctgtttgttgcaacaagtttctgcgtcgagctccgaggaggctggcgcaacccgcaccgcgggggccgtcgcggcggcggcggcttgaccacccctcttgcccctctcaagggtaggcttgggacctcctcctcctcctgtttgcacagctggatggaactgggctcctcccgactccccagggcaggatgcgaggctgctttcccactccgtccagatgtcagacccctgcccgttgggcccagcagctgggccgtcactcgcggtccgcctcgagtgctccggcaacctcgccctgccccgtcggttcagggtcgcccagtccccgcgcccccccgaccccaccttccgtgggcctgctgcctctggccctgagtcacttcccccgccatgccccacctcgcccagtccgcctctccacccaggctcccgcggctcggcctccctggccccgcgccctcatcccttccccagcgaacacgcgggcgcatccttccccacccccaccttcaccccagaactgagggggtgcctgtgcttttgcacaccctggggaaagtccccgggtcacgcggttgtttgtggggagcctgtgacgctcaggcttgtccctatgcttccgcctacagagtcacaactgckaactgtggcggcrgcactcagagcgcgggccgacccccgcccggccactgaggcgggcgggcgggagggcgcgcacgtacgcacgcacgcacgcacgcacaccccggccctggcgcccctctttcccctgctaccagacacgcggtcacgtggggccatcgcgggctgccggcgcgggaagccgcgcgagaggcggccgaggggtgcgtgagccggcgccactgcttgcagtgcgcggcttgggagcccgcccctcctgcacggaggagtcggcctgccgccgcggcggcatctgggtaagcgacgcggtcctgcccctgtgggctgccccgggctcagtccctcctgccgcgagccacccagggcggcggcctgcagctgcaccagtcgcgggacagatgcaagtagctggggagaggggtgtttttggtccgattgagatgtcaggcagggcacaggaggaaaatacatccgcgagtgagcgctgggccgacaatacccagaaccaccctttgctgctcgtaggagcggctgccggggcctgattcagggtggcacacggggtgccgcgaaggtgcagagccgtcccggccgcgggtccgggtgcgacccccagcaggaaaccccagtaggcctgcggcctccctcgggtagcgccgacccctcttacgagcgggcgactttccagatgctgggaggacgctgcggctactgtttccactcccagcttgtgattacctcgtttctagggcaagaagacatcccccccttttctatcttcaaattatgtttatcttgttctaagcatatccggtttttctttttgaagcttgacccatcttatcaccgtcttctctggcactcagtatttggagtaatcagttgttaccagttgcggaggcagcgcatagcacaacgtagtacctggaacctgacggcacctagcatgtttcaacagttagcgcccgcatcaccccaagggattaaatttggcattctttctcttgagactcaagtcctggcagagctgttgatcctctcacaagattctgtcatgtatgtaaagtacactttggaatcttaaattttagagccgagaggtgccttatagaaaatctgtttcatccctctcgttttacagagaagacaccaggcctgaagagcgtgatgtagctggagctagctacacctcttgatagctaagactccaaggctccagacaccttggtgattgcactctccaccatgccaggaccgcagtgccagtttaccccactcacctgtagagaatgtatccggcggaggtcattatatatacttggcttgattcagkttatggagaagtcaggcatggccactgtgtgggtttgatggtatttctaggtgaggtaggccgcctatggtgtatttttggaactaaaagcctacaccccccagccacccctgaaartttcattgctgttctctattatttgcagcattggttgcttccttatgttaaggcatcaaagtcttctttaacaatctggatatattttagttaagggtaaatcgtgaatccgttatcggacatcaactccttaatagggaacagaacactgatgggatatgacatggaacagattaattctgagagctggcagtcagtgaaatatcaaggtgtggtcaggaagaaaacagaaaggaacccacgtaacctgctaacaccttttttgtccagtcctaccttgaatgtcttatttgcatgtagtagagatggattctgctcaagttggccgctgtttactgagtacttgcagtgggccaagtatcatactagctgctttcgtagatgaactttgtgtctttaccaaaaaggagatggtactgtcttcatgttacaagcctgaggaaacaggctcattacctgggctgtggtaatacagtcattcgcagtagaatttaagcctagatcgcttatctctcaagtccaatcagtgctgttttgcattatatcttgctcctgtttcagccgggaagggaatgagagaatcgcctgtggctgatttattggcgcctgtggttgcccagagaggccaagcaggactttcagctgccctctatgccttacaaagtggagctgtgagcttccaccctatctcctgaggggaatgtgaaggagccaggctgtctagctggggaggaggtgccttggccgtaaaatatcctggccagggctgtgctgggaagtgttgcataatgtcctccccaccactgaaccaaagtgatttatttgctatggtccgtaggtggtgcctgaccaacttgtccattttagcaataacagggccagaaaagagttgggggttttatattattgcagggtttttccttgttttaaaaaagcagtgcaggtgctcttatcttgataagttataaagtgcttctttctgcaccacttcctgtgccccttttctgtgtatttattccaaatagcatgtgaacttcagtcttttaagaagagaaagctaagaaaatattgctccagtttattagcacaggctatggagacagacctggctttttatctccactttataccatttgctgattgtgtgtcctaagcttaggatttttcctcatttgtaaaatggaaatgaaaataatacattagtcatcacagtgacgattttaagagatagtgtatatagagcacttagcacaaggcctcgcatatagtatttattataataataggttttgaaaataaccagaatagtattctccctaaaaaggaaagatattgctacttgaacctgcttagggatagaggaggaagaagaaagtgtttgtaacaaacatcagtttcaggattattgattaaatttttttatacttctggggttttttttgtttgtttgttttttgagacagagtctacctctgtcacccaggctggagtgcagtggtgtaatttcagctcactgcagcctccgcctcctgcattcaagcgattctctggcttcagcctcccgagtagctgggattacaggcgcctgccaccacacctggctaatttttgtatttttagtagagacagggtttcgccatgttggccaggcgggtcttgaactcctgacctcaagtgatccgcccaccttggcctcccaaagtgctgggattataggtgtgagccactgygcctggtccatgttttctttatccatttgactatccatggacatttgagtttttcccccttattggcaattcttctgcctcagcctcccaagtagctgggattacagacgtctgccaccacgcccaactaatttttgtatttttagtagagacrgtttcaccatattggccaggctggtcttgaactctgacctcaggtgatccaccctcctcggcctcctaaagtgctgggattataggcatttatttaccgttctgctttccctttgctagcaggaattttctttctctctctctctctctttttttttttttttttttttkygctttattgggagaaaaagtgcttagagtgttcagttattttttatatttttctaattcatttcttctctggttacaaatcagtcatgcatggatgttttattttttctgaaatctccaagcactttaagcaaaggtttttattagcccacttgagtagtgtgttcatgggagtatacttccattgcgaaagaagtattggtttacttgtatccagaagttttagttactcttgcctgtactgtattctaggtctgtactagcattataattttccatctttctcctgtcctttgagtaccttattttttcttttagaaatttggtttgtctttaatggactgagaggaatcttttcctttctttctccgggttctgattttttttaaaggtctattaacaatttgtgcttactgttgttagtattcttgtgtgcttggctttatcaggcatcctacaatgtaatgttggttagatgggaattagaggtgcttggaggttggctatgtctgccaacaggcaggaggccccaaactaacgtttcccagttccattaaaggtttctagagcataactactcttcctgtttcatctaccccctccataccctctttgctaacattctcagtagatcttaataagcagatgtctggaattacagcagattttacctcaaacagtattttcagatttagaatttctgtatcatttttaggtgttatgaaatccaatctaggtgtaatggagtaagagagtaaatatttctttttcctaaatactatttgaaaagaagtctgaaaatagtgtgttcctccacccccccacccatgcccatcctgccagtttaggagcacttttgattcttttttttctttttctttttttttttgagatggagtttcactcttgttgcccagactggagtgcaatgacacaatctcagctcaccacaacctctgcctcctgggttcaagcgattctcccgcctcagcctcccgagtagccgggattataggtatgtgccaccacacctggctaattttgtatttttagtaragacggggtttcttcatgttggtcaggctggtctcgaactcccgacctcaggtaatccacctgcctcggcctcccaaagtgctgggagcgagccaccatgcctggccatggagcacttttgtttcttaatctggccaatattttaaggttacaattagaattacagttgtttatatttgttcatttaatgtagtcaacataatttccatactttgaacactcttacggaattgtttatttatagagactagtataaagttgttctatcttacttagtttgaactaatccagagttatacaatctagaaagtaaagaaagtttttattgtctcttaaatatcaatgtaattgtagagtgtgaaataatttcttgggtttccttggtcccgtgttcttctgaggcagtggttcttaactgagcagtcacgttagaatcacctgggaagctttttaaaaaaagaatctgggctgggcgcggtggctcacgcctgtaatcacagcactttgggaggccgaggcgggtggatcatgaggtcaggaaatcgagaccatcctggctaacacagtgaaaccccgtctcgactaaaaatacaaaaaaattagctgggtgtggtggtgggcgcctgtagtcccagctactcgggaggctgaggcaggagaatggcgcgaacccgggaggcggagcttgcagtgagccgagatcgtgccactgcactccagcctgggcaacagagtgagactctgtctcaaaaaaataaaaataaaaataaataaacaaataaacaatctggccgggaacagtggcctacgcctgtaatcccagcactttgggaggccaaggcaggcggatcgcctgaggtcaggagttcaagaccagcctggccaacgtggcgaaaccccatctctactaaaaatataaaaattagccaggcgtgatgggcacctgtaatcccagctactcaggaggctgagtccgggagaagcacttgaacccaggaggcggaggttgcattgagccgagatcgcgccattgcactccagcctgcagcctgggcgacagagcgagactctgtctcaaaaaaaaaaaaaaaagaatctgtgcctcacccctagcaattcaattctgtttgggctaagcctgggttgggactcagacatcaatacagctctgcatagaaggttttacagtatagtcagcaataagaacctctgtttcaggataaaatgatttctacaaacattgtttcattctctacataattaaatgtcacacctctacagtcatgtgaaagttccattaaaaagttagtcgctatataaagtcttttatcatatggcacttgaaatattttgcttttgcctttgtatttatagccatgagtaagtagctcaaaaaagatgtacatattcctctgccaactttcctgtctccttgtctgaatgaaaattcatcataaagtctcagtggtaagcattgacagagaaaatacctaagactgttttcctacagaaacagtcgtcttgctctttttgttccttttttattaaggattcttacagcctgagagaatgaagagctgtgtagtccaggatatccggctggctaccatagatctgagagtccagtctagtacagtagatttttctaaatacataagaatcaaagatatgtattgaatatcaagccagctttaaacaaacatagatactagtataaagttgttccatcttaatttgaagtaatccagagttactacaatctagaaggtaaagaaggtttttgtaatctcttaaatatcaatgctaaaactattatgataatgtatcactttgataacagataaaacttttaaaaatgtagcactcatattttgattctggtatttataagtataataaaatactttatttttccataatttctctcacatcttaaaattctcaccagaaattctcaaatgtaacttctaagctctttctgtattcatgggaaactttagctatttcacatactagagaaaataaaatagacagtcaaagaatgatgagcaaaggctatacaaaaagtctagctaataatttgcagagtaggttgtattagaaaatgttctaataactcaatggaatggggctattgatttgaagtaaaatctggtatattacaacatcaaagatctcctattatgcaaaacaagtttgaatgcacctcatgtgtacttggtgttttttttttaatagattttaatttgtttcattttatacacttgaaaagtttactcccttatttgattcaacatatttgcaaaatctgccaacagtgtaaatgttgaaagttctagatggggttttgaagaaagggccctgggtttaaactcagtcttgatgtattatcagcaccatttaatagctagttgtttgacttcaggtatgtttcctgccttctctgagcctgtggtttctcagccataaaatagagctgatagtacctgctctactacctcacaagatttaaaagaaaaaaagatagtgtagggcagtggttctcaaagtgtagtccaaggagccactggaggtttcatgggtcaataaggatctcccttatgtaagaacagattctcaatatacttgaaccaaaacaagagatgacaacagattgaatgcagaatcagataagagagtccagctgtatctgttaaagccagatattaaagaggattgcaaaatgtaaattaatatcacccttctcacttgtttttgaaaaattttttaggaaaaaatatgttaatatgtaatgggtttattgctattttaaatattttaaaatttcttttaattttgaatatagtaaatattgataaatataacctatataaacaacagctcttcacaatctctaatactttttttttgagatggagtctcgctctgtagcccaggctggaatgcagtggtgtgatctcggctcactgcaacctcttcctcccaggtcccrgttcaaacagttctcctgcctcagcctcccgagtagctgggattacaggcacacgccactgtgcccagcttttttttttgtatttttagtagagacggggtttcaccatgttggccaggctggtcttgaactcctgaccttgtgatccgcctgccttggcctcccaaagtgctgggattacaggcgtgagccaccgtgactggtctgtaatactttttagagtgtgagtggatcttgagaccacagctttttagaactgctgataaacagtaatggttgagtagggctgctctgcctatggagtagccattcttttatttattttctaataaattgctttcgtttaaaaagaacacaatgttgggggagggggtaatggttgaatagttcctatcaggacagtttcctgcagataactataaacttgatacactttttttttttttccttttgagatggagtttcgctcttgttgcccaggttggagtgcagtagcgtgatctcagcttaccgcaacctctgcctcccaggttcaagcagttcacctgcctcagcctccagagtagctgggattacaggcatgtgccaccacacccgctaattttgtatttttagtagagatggggtttctccatgttggccaggctggtctcgaactcccgacctcaggtgatctgcccgcctctgcctcccaaagttctgggattacaggcatgagccactacgcccagctgataaaagttttaaaaattaatagatggcatttgagaattacaaaaactagattgaggtctgcaactggaagaggagaacagcaatgaataagcttctgtttttatggcttttagactggcataaggtcccagctggtgatatgaagaggtggctacaactgtaataacaacctgtaatctctcttgaagaaaagaggacagagctcacagtgatcatgcagctggaaagtgcaggagaaaatcctagaaagaatgttggagtggcagaaccccaaacactgtttataaactctgcttgaatttcttgcaaacccctcaactgtacatgtgtggagcagcctccaaacagcacacttaaggctaaaggagcagagatttcagctgctgtccaccataggggaggcagaacttggagtttaagtccagctaaggtaattgtctgcaaaaaacaaaaacacaaacactctttggaagaatattacagaatctagagtgaattgtattaatcacaatacctagactataatccagaaacaatcaccctaatcagtggagactgaccccataattagccaaaggttggatttagcagagaagatttaaagcagcagctattataactatgctcaaggatgtaaagcaaaatgttgtatatgtgaacaaataggaaatctcagcagagaattagaaactttaaaaaagaatgaaatgaaaattttacatctgaaaatacaatatctgaaacaatcttgaatagatttaacagatcagatatgacagataagtcatttaatttgaggatagattaatagaaattatctaatctgaagtagagaaataagttattgtatatgaaagttctctgtaaacttcagtgctctatgtaagtttcagagtttattactccaggttkctttcatatgtaaagggaagaggtatgtttgggtcttctgatctgcagcttccttaatgtcctgtcctgtcatgtctgtgtctaagctttataccctctggtttctttatttttatttttttatttttttttgagacagagtctcgctctgttgcccaggctggagtgcagtggatctcagctcactgcaacctctgcctcctgggttcaagtgattcttctgcctcaacctcccaagtagctgggattacaggcatgtgctaccacacctggctaatttttgtattttgagtagagacggggtctcaccatgttgttcaggttggtctcaaactcctggcctcaagtggtccactcaccttgtcctcccaaagggctgggattacaggcgtgggccactgcgcttggcctagcctctggtttctaatatcccctgcagtcagatatttggcccttgctgctttcctgtactattgtcagaggttaccaggaatcttttggtcagtacactcgacatgtttgtaatgggcctcacccccatgtttctcttcagtgttttgcaccattgccatctcctttctgcaaggtcattgcctttcctcaatgacgatgttttcttttttctcctcctctgtcttattttgtcttttctgttttccaaagattcattcttagcttttttccctcttatttcattctactttttagtctrctttattattttcatacttggttacttcagccttgtcgtttcagaggcctcttctccctctctggctctgctctctctagagccctgtcctgcttcttgtccccgctgatcactaaacatttctacttagatacctggtagacacttggagctcagagtgtctgaagtgaaacccctattcttcttcttcttttttttttttttgaggkggggtctcagaacctcttatcaagacggtttctgtacttcttctctaatgttctgggactctgcctttatatcaacacctagcacatggcagttactctgaaaatgtaatctgaaggaatggatgaattcttccaattacccaagctggaattctgagactcacctttgatttgatctctgtggtgacaagtcatgtcagttttgtgtctgatgtatctcttgtattccttccttcattcccactgcgattactttgataccatagtaggctcctagccagtctttctccatgccttttcccttgctaatattttttatatgttgctgttagagcagtctttactcacgcctaatgatggtgatgatgataatgcctagtatttattaggcactaactgtgggcccactgtttctaagtgcattatatcattaaattcaaataacctataagttagatactgtcattgtccatattttataagtgaaatggaggcccagagagttaagtgtcttgccaagaccacgcagctagtaaatggcagagctaaaattttaagctgtctgattttagttcaagctttaactaccacgctctgttctccctcccacagagtaagttaactgatcatgctgttcttactcaaacatcttacatagttcacttcaaacacgacactactttttagtcttatattctgtatsctttttgarctgaccacatttcattatttctgttactttttttttctatgccaagctgaatccttctgttatctaactattcatattcttcccagtaattttattcattttattttttctgcctggccttgtttcccatcaagttgcctgtgtttatctccctctgatagcatgttctctaactgctctgtgctactgaatgcatttatttcatattataattatggtttgatgttttatctttcctgtgagcctgtaatcttgagtgtagcatcttgtcatttttttctgtctccacgccttgtacaatgcaggcttttacacattttttctttattaaattgctcttcaaaaatatctgttgaataagtgaagaatttaactgttaccaacagaccattaaccataagattcctgtatgggtggcttattagtgtgctatgtctcatttccctatggttcagtagttcaatataatgggaagaactggtgaaaatgtttatgatccgagggtttggttttgttttttttttttgagacaayttatcaggctagtttaagatgcttcaatatgaaccatttcattgattctaagacacgtttttcacatgctgaaattgtcaatacagatttttagtttgttaggccgggcacggtggctcatgcctttaggaggctgaggtgggcagatcacctgaggtcaggagtttgagaccagcctggccaacatggtgaactcccgtctctactaaaaatacaaaaattagctgggcatggtggcgggcacctgtaatgccagctacttgggaggctgaggcaggagaatcgcttaaacccaggaggcggaggttgcagtaagccgagatggagccgttgcactccagcctggtcaacaagagcaaaactccgtctcaaataataataataataataataatwtaacttggggattattccacatcagtacattaaatatgtagttttaatagagtctgccttttttttttttttttttttttgagatagggtcttgctctgtcacccagggtgaagtgcagtggcatgatcatggcttactgtagcctcaatcttcctggctaaagctatcctcctgtcacatccacccaagtagctgggactaaagcatgcaccaccgtgcctggctaatttttgacacataggaagcactataaaatgttagctatatttattatattactgatcacttagctgtctgctgcccaagccactgccaatctttagacggctaaccctgcattacatcactgacctccttagaccttggtctggctggctggtgtggaaacctcattctctttttcagtgtctgctctttcaaaggatgttctcctggccacccaatgatgccctttatactacagctaccttctgcctaaagtaccagggctctctccacagtagggtagagaagatgatgtacagtctgccacctgcctgaaaccagggcacttctgaatgtttttgctgcttatactcggcttcttggccagaattctgcatgttcttcctcatataggcttccccgcagttgttccaccttgccttttacttcctttgggaacctacattataatatgcgtctgaatccagttgagatcagttctttcttttgtgtgtgtgtgtgtgtttttgagacagagtctcactgttgcccaggctggagtgcagtggtgtgatcacagctcactgcagccttgacctcccagkcttaagtgatcctcctgcctcagcccctcaagtagttgggagtacaggtgcatgccaccatacctagctaattgttttattttttgtggagatgacgtttcactatattgctcaggttggtctccaatacctgggctcaagcaaccctcctgcctcatcctcccaaggtgctgggattacaggcatgagccactgcgccagcttaagttctttctcaggaggctcttgggccacaagtaaattggggatgtggcttgacatctattttaagagttcctgagctactgtgatgataagtcccccaaacatttgatgagagttgggaagccagtatcccctgagcaccagwggatccctgaggaggagtgacatctctagctcagccaggataccgtgttatgttattaacatttatagctaacatcgaatagcagtttccattacaacatgattttcacataagttatttaactctgaggcaggaatcagtatctcattttcatttttctaatgaggaaacaagattagaaacattgtgttcacatagatggaaaaggacaggtctgtcttcatgtgtcactcataccaagctatcttcttaccagatgaaaaagggtcatattttatggttcagcagagtttatatcagttgtcataatggaggaatttagtgttagccgtgtttgcagtgaaagtaataggattgaaaacttgaataatttcatttaaatttagatctccttgttactctgtaggtttgtgtgaactgtagacaattttgtattaataaaaaataatgcgtatatacatacwcacctatctacatttatcttgtcctttttttcagaaccacaatggacactgccagccatagccttgttcttctccagcagctgaacatgcagcgagaatttggttttctgtgtgattgcacagttgcaattggagatgtttacttcaaagcccacagagcagtgcttgctgctttttctaactatttcaagatgatatttattcaccaaacaaggtaaggatgtgtttttgtaaataagaatttttaatattgtgatttatataagctttattatagtatcattttggaaattctttgttacggagtcacactaagaagtaaaattataattttttttttttttttttttttttttttttttttggcgacagagtcttgctctgtcacccaggctggagtgcaatggttcagtgtcggctcactgcaacctctgcctcccaggtacaagcgattctcctgcctcagcctcccgagtacctgggattacaggcgcctgccaccacgcccggttaatttttgtatttttagtagaggcagggtttcaccatgttggccaggctgatctcaaactcctgacctcaggtgatccgcctgcctcagcctcccaaagtgctgggattacaggcatgagccaccatgcctggccaaattataataattttttatacattagtaattaaactcagtgtgtaggatccataatggaaaataagaatgaaaataagaatagctaaaattggctgggcgccatggctcacgcctgtaatcccagcactttgggaggccaaggtgggcggatcacaaggtcaggagttcgagaccagcctggccaatatggtgaaaccccgtctctactaaaaatacaaaaattagccaggcatggtggtgggcgcctgtagtcccagctactcgggaggctgagggaggagaattgcgtgtacctatgaggtgaaggttgcagtgagccgagatcgcgccactgcattccagcctgggtgacagagcgagactctgtctcaaaaaaaaaaaaagaaaaaggaaagaatagctaaaatttattgaaggcttatcccatacccaagcactaagtatttgccctataatgtaaattctactgctgtccctatttcaggaaaaagaaaactgagactgagttaagtaacatgcccatgcaggattatacagctaataagttagatgcagatttgtctgaagctatgtctatgcttttagtcactaagctgttaatttttgtttcatataacacttttgttttttttattttttatttttattttttttgagacggagtctagctctgtcacccaggctggagtgcagtggtgcccaggctgaagtgcagtggcatgatctcagctcactgcaacctccgcctcccaggttcaagcaattctcttgcttcagtctccctagtagctaggaccacaggtgtgcgccaccacacccggctaattttttgtaattttagtagagacagggtttcaccatgttggttaggctcctcttgaactcctgacctcagatgatccacctgcctcggcctcccaaagtgctggaattacaggcgtgagccaccgcaccctgctgatttcaataggttctttcagaagttttaagatatctttattgtggctataaacatataaaatttgccattttaaccatttttaattatacaatgcagtggtgataatcacattcgcaatgttgtacaaccattaccactgtctatttccaaaacttttttatcaccccaaacagaaactttgtacccattaagcaataactccccatctcaccctctcaacccccagaaaccgctaatttactttctatctctatgaatttgcctattctagatattttatataatacttgtccttttgtgtctggcttattttacttagcatgatattttctgggttctccatgttgtagcatgtatcagaacttccttctttttatggttgaataatattccattgtgtgtgtaagccatcttgtgtttatccactcatcttttggtgaacactcagcttctttctaccttttggctactgtaagtaatgttgcagtgaacattggcatacaggtatctgtttgagtccctgtttttagttcttttgatcgtttacttgatagactgttaaattccttaagagcaggtacctattttattcatcagttttctaccgctggcatctagtatagtgcatatcacttaggagtcacttgattaatgttgaactattcagaatgtatgtctgtgtttcctaactttaggcagtagattgaatacatgaagactttttgctaggccataaagttggtataaaatgaaagtttaagcctttgttgccatgttttattaaggcagattgctaggttcgaacttcttaggaagaaattgctttagtctcagactatactgttaactgaaaggccagctaggttgtgtttcatttcttgtgggtctgtttttgtttttaacagtgaatgcataaaaatacaaccaactgacatccaacctgacatattcagctatttgttgcacattatgtacacggggaaagggccaaaacagaytgtggatcatagtcgtttggaggaagggattcgatttcttcacgccgactacctttctcacattgcaactgaaatgaatcaagtgttctcaccagagactgtgcagtcctcaaatttatatggcattcagatctcaacaacccaaaaaacagttgtcaaacaaggactggaggtcaaagaagctccttccagtaacagtggaaacagagctgctgtccagggtgaccwcccccagttgcagttgtctcttgctattggtctggatgatggcactgcagaccagcagagggcctgtcctgccacccaggccctggaggagcaccagaagcccccagtttccatcaagcaggagagatgtgacccagaatctgtgatctcccagagccacccctcaccctcatcagargtgacaggccccacttttactgaaaacagtgtcaaaatacacttatgccattactgtggggaacgttttgattcccgtagtaacctaagrcaacatctccatacacatgtgtctggatccctgccattcggtgtccctgcttccattctggaaagtaatgaccttggtgaagtgcatccccttaatgaaaacagcgaggcccttgaatgccgcaggctcagctccttcattgttaaggagaatgaacagcagccagaccacascaaccggggtaccacagagcctttgcagatcagtcaagtatctttgatctccaaagacacagagccagtagaattaaactgtaatttttctttttcaaggaaaagaaaaatgagctgtaccatctgtggtcataaattccctcgaaagagccaattgttggaacacatgtatacacacaaaggtaaatcttacagatataaccgatgccaaaggtttggtaatgcattggcccagagatttcagccatactgtgacagctggtctgatgtctccctgaaaagttctcgcttgtcacaagaacacttagacttgccttgtgccttagagtcagagctcacacaagaaaatgtggatactatcctagttgagtagcagcttctctttcagaatttttataccaattctgaaaaagaaaatttgcrtggcatttttwattcataaattattttcctcctcaagtttcattgactttttttcttcacagcttatccatggttttaaggttgtatatattagatcttctcataagacatattaatatgtggctattaaaatgtaacattcaattactactgtgaacttttcacaaacgaaataacaatttagaaatcagaaatcaatgtagaaatatggaaaccttaaatagttatttatagaattctaagtttttccagttatagaatcagtaaaatcaaattgaatataaagtaaatgaaatctgttttaaagcatattctaaactatcacttctgcytacatttcacatgaattcactcctaccaggattatttttaaatattttcttccatataggaaattaatagttactttaatgcataactgtatgttatacatatgttataatgtataaaaatttattttaagatataccaaatcatgagtagttttattttttaactactagctccacaacatcttacctacatggcttctctttactttttaacattgagtatacctctttttttttttgagacagagtctctctgtgtcgcccaggctggggcgcagtggcgcgatctcggctgactgcaagctccgcctcccgggttcacgccattctcctgcctcagcctcctgagcagctgggactacaggcgcccgccaccacgcccagctaatttttttgtatttttttagtagagacggggtttcaccgtgttagccaggatggtctcgatctcctgacctcgtcatctgcccgccttggcctcccaaagtgctgggattacagatgtggtatatctcatttttaataaaaaaaacagttaaagggagaagagtcagagagacattaaaaaatatttaagaaacagtaagatatacacacatagataaataagcatgcagagacagagactgagctagaactgcattgactaaaaaccccagggttgttaacttggtctagagtgttttcttagacaccttaaaaagtaatttgagattttatgaccagaggtttacatgagttgaaagagaatgatgataaaatataaatcatgtttctaccctcagcgtcaggatttttggggcttcctgggttgattttaattttctaaaaatcactgaaaaagtaatttttcagtggcacagttttcacttttttcctgatccataaaaccagcaaagtggatacattcagtgttctataactacatttaagatccatgatgttagcttttcctytataaatcaacttaactctcttttataatggtgacacttacaaagctaaaaccccaggaaaattaaagttgatgaaakaaataacagattccccggctctatatacctgggaaatagctggttaagcttcaccacaaaggatagatctaaattgtttctraaatgtttaaatttcaaaccccgcatagtcaaggataataraacagactcatctttttttgccctcttgttaaattmtaagcttcacrggcatttgaatacatctaaaaaatttggtttgtgagccttagaatttaaccacttacaaaactcttgagctccctccacttstgaggacgtttcctgacacattcaacagcatcagcgtccaatcagsagggagctcaaagagtaatccagctaattctaaggacacaaaggttttctctaggtaaacagtttaggtaaattacaaagtggtaagtttttcttgaggattgaatgaagaaagctactggatattgtgtaaggcagttgagtttctgccttaaacaagtgagtaaaggctcctatggttaagactgatgtgtgttgagagcacatctaacttgataagatcaattgtattgggagtaattaaaacaaatgtatgttctttggggtcagaactttgtctaatcttaaacttttttctaccaattcacttaagcaactattgaaatttgtactgccctcaaaaatatcatctcattggaagaacacaagtattaacattgattttttgtattttaggctagttaagatatatttcctagccttcttcaattcaaattctattgttcttattaagataatttttctcctctatattcttccctgtttgcctactcattattattatttttttaatttaatttttttttaagatggagtttcacccttgttgcccaggctggagtgcaatggcgtgatctcggctcactgcaatctctgctgcctgggttcaagcgattctcctgccttagcctcccaagtagcttgggattacaggcatgcaccaccatacccagctaattttgtgtttttagcagagacagggtttcacyatcttggtcaggctggtctggaactcctgacctcaggtcatgcaccagcctcggcctcccatagtgctgggattacaggtgtgagccaccgtgccaggcccactcattattctttgacacaggaaatccttgtatatagctaaagggtggaggtagagttgtacatggttggttggataagacagcaagtrcctcagggcagagtttggataaatggtaagagtttgctagcagctgattggccrtgatagacaacactsatttaaagcagaaatatatctgttcgttgagagttaagaaaatagtggttaactgtatttctattcttatagttccttttaatattagaaattcaaagcaaatgctctttccttgttccttaaaacattcattctgtttaggaagtgggaaaatatcaacttcattttatagaaaaaaaatcccaaaagctgaattccagagatgcagtgaatagtggtgtgggactgacccccagtttttgttattgttgttttcatttattctgcaggcttttttttttttttttttttttttttttgagacagtcgtgctgtgtcgccaggctggagtgcagtggtgcaatctcagctcactgcaacctccrcctctcgaattcaagtgattctcctgcctcagcctcctgagcatgtgccaccatgcccagctaatttttgtatttttagtagagacagggtttcaccatgttggccaggatggtctcgagctcctgacctcatgatctgcctgcctcagattacaggcatgagccaccgcgcccgggtctgcaggcattttttaaagtaactgtcatatgcctaacactgtgccctgagtattattttttaaagacatgattgctcactgagaaaatttgctttgtattttaaaagttcttccagctaggccaggcgtggtggctcatgcttgtaatcccagcactttgggaggccgaggcgggcgggtcacgaggtcagaagatccagaccatcctggctaacacagtgaaaccgcgtctctactaaaaatacaaaaaattagccgggtgtggtggcacacacctgtaatcccagctactcgagaggctgaggcagtggaatagcttgaacccgggaggcagaggttgcagtgagcggagatcgcaccactgcactccagcctgggtgacagagcgagactccatctcaaaaaaaaaaaagttcttccagctaaaacctttattttttgactacatctccacaaaatggagctatactgttagccagtatcctaatagtatagtgcagtttgcataatgattaccaagcttgaaactggaaatgtcatatgcactttcgtgtgtatcaggcagatactaaacattttccccttgagtcagcttaaaatttttccttcttttgaaatctcacgcagttgttttctggagaaaaatagagactgttttagtatttgttcttattagcgtatcatcagaactcagcacagtctgccttataagaaaacaaaaaatttttttatttataactcttgagattgttacttcttgctctttctgatttcccatccgtaaagtgggtgtaagcaatacttacctcacaggggtgttgtgaggatttatattaaacgtgttaagttctctcagtattattgattaaaatcaaccatataaacgacatttattctgtagctagacctattaactttagtatttcagcctataaattctaaaatgttcttaaaagcagtaatgtactatctaatattcaataactaattgacagaactcattgttattttttacaaataactagaaacaatactgttgctagaattcctgttctactgtaatttaatcatcactgtttctttttagccttcagtaaggaggatactagttctttggcattattgggaataaaactttgtcaatttcagctttaytgaaagttctcccaaatatattgtttttgtttacacaaaggaaaaggaacaaaaacaataaakaaatacctttgtttttttttcttttttgagacggagtctcgctctgttgcccaggctggagtgcagtggtgcgatctcggctcactgcaacctccgcctcccaggttcaagcgattcttcttcctcagcctcccgagtagctggaactataggcacgcaccaccacacccagctaatttttgtatttttagtagagatggggtttcatcatgttggcaaggctggtttcgaactcctgaccttgtgatctgcctayctcagcctcccaaagtgctgggattacaggtatgggccactgggcccagcctatttttatttctttgatgtaggtgatctaaatagtagatgaggacaggaaatggggtgaaggtaataatagtattattagaaaagtcttcactgaaaattgaaggaaatacatattaatcgtggaaaaagatagtgtgaaaaatgtgtaatttcgttaacatttatttgtacaggcacattcttgatgttgtgagtcagatacttgataaatgtccattttttgtagtaattgatgtaaaaatgggccatgtgaagaattttcataatgtaatttgtgtctttgtatattttgaactacatatagatttgtggcacttaaattattaatttttgatttcttaagagtgaagtctgtaaatgatttctctctgctgtacttctgtgtttgtatggttggwcattttgaaaactggtgagattgcacagtcccaaacctggatgtcttaaatacaaggaattacaaactgtgatttttgtcttgaagacctggaagaattcattgtgcttcagtatgtatttgtactgcacttgattaattagttaagtattggtctggtgcaattgacattaactgtcatcaactcctctattttgtgctaaataaagtcatttagtcagaatggatcaaatataaacttatactttaaaataaacttagattataaaaacttgttcaataaaaaagacccactgaaaaatcttcaaagtacatgtaacacatagctaatacaggagaccaaaatcaataatacattgtgtggctaaactcatccacctaatgtactgtgaatttgcttcagaaacattcttttagaaagttgtgtatctgccgggcatggtgcctcatgcctgtaatcccagcactttgggaggccaaggcccaggagtccgagaccagcctgggcaatatagtgagacctcatctctgccaaaaattttggcyaggggcagtggctcacgcctgtaatcccagcactttgggaggtcgaggtgggcggatcaccagaggtcaggagttcaagatcagcctggctaacatggcgaaaccctgtctctactaaaaatacaaaaataagccaggtgtggtggtgcgcgtctgtagtcccagctacttgggaggctgagacagaatcatttgaacccgggagatggaggttgcagtgagccgagattgcgccattgcactccagcctgggcgacagagtgagactccgtctcaaaaaaaaaaaggcagggtgtggtggctcacacctgtaatcccagcacyttgggaggccaaggcgggcggattatgaagttaggagatcgagaccatcctggacaacatggtgaaaccctgtctctagtaaaacacaaaaaattagctgggtgtggtggcacgtgcctgcagtcccagctactaggggggcagaggcagaggaattgcttgaacccgggaggcggaggttgcagtgagccgagattgcgccactgcactccagcctggcgacagagcaagaaacaatgaatttcatatattttatcaagacaaattaatgtgacttaatcaaaaacaagtttattagcttagcttatagaatgtgttcttattttacatcagtgtttgccaaatgttgtgttcctagtgttgaggcaagtagtctttgtactgggtaacattttggaggtgtgatgcaaaaatgcatttgtggacctaattcttaccaaccataatctgtgttaatcgaaaattgacgtcctaatcaaatgctttccaactgctgtctctggaaagaaaggtagtatttcgtcatttcccagaagtttcttgctttgcttcttcttttttttttttttttttttttttgagatggagtcttgctctgttgcccaggctggagtacagtggagtgatctcggctcactgcaaccttcacatcccaggttcaagctattctcctgcctcagcctcccgagtagctgagattacaggttcccaccactacactcggctaattttttgtatttctagtagagacggagtttcaccatgttggccaggctggtctcgaactcctgaccttgtgattcacctgcctcagcctcccaaagtgctgggattacaggcgtgagccaccgcgcccagctgcttctttcttctctatttacagtctactgtatcgccttttgcccccagtaacatgatccacaatagtagttctcaactgaggtatattagtcaggattctccagaaaaagaaagaaacaacaggtagaactgagagagagaaagagattgattgattataaggaataggttcatgtaattatggaggctgagaagtcccaagatctgcagttgggaggctgagaggctggggagtcagtgatgttccaatctgaatttgaagacctgagaaccaggagagcttatggcataagttccagtccaaaagctggcaggcttgaaactcaagaagagctgatgtttccatttgggtccaaagggaagaaaagaccgataattgcagctcaagcagtcaggccagagaaagtctctttttttattatattctggccttcaactgatggaatgagagccacccacatcagggagggtgatcttctttacgcagtctactgattcagattttgtctccctccagaacaccctcacggacacacccagaataatgtttgactaactattggggcascccatggcccagtcatttggacacataaaattaaacattacacagggctatccccccccatagagacatttgacgatgtggagatgtttttggttgtcacagttgggtgggcgatgagggaggctgctgctggcatctagtaggtggaggccagggatgctgctaaacatctcagtgcagaggacagcctcccgcaatacagaatatgtacctcaaaatgtcattagagctgaggttgaccaacccttctgagaccttaaagtaagttttgtgatggctgtcaggaataaaagaatacaaagaaacccaatttgggggatttctattctagtcatgtttagagcaagtattggagtatgagatgtgttcagaattaaattctatttgtattatccttgatcccagcttttaaaagataaaaatgtgattattagaaataaaaggaaaaaatgtgattattaaaaatcagagatgtattaatcagcaagacagttttgaatctattcatataatgtttgaactaaataattgtctccccaaagaggtctcttcatgaaattgagattgtaggttataatttctgtgaatttttaatctggccaaaaggtggcaccagtgtacctttaaaaaaatgttcattatacttgaattcagcattactattaatagtaaatattatttagggcttagctacttttggatcatgctttatagagtcaagactaatgagaattttcttaaaatttcataaggtactgcaatatcttgacatccctctttaatcaagatgcttctgatttacatgtacatatctcagcagataactttttaaaatatcacattattgtgctacattgagcatttctgaagatttttccaagccattaactgtgaggccttggaatttgggctcttttaatcaggcatcacactcagtttttggtgttctgcctggtcaagacatagattgaaggacatttgagtaaatacgctcccttgctcctttcttgccttttgttcattttttgtacatccacaatctatgaggtatgttacctactgaaatttactttcttttccaactgtggttcaacaactgayyttcttctctcatactttccaacccattccattctgaataagttaagagttttcttaccttcagctcttctcaccttccaatactaagtgaatacagcctgcctcccccttcatttctgattacaatattattctcatcatcctaggactttgtacctaatcaccagttgcttctcctaagtttattttacagctgataagccaacttggaaaatgagcccactctccctcagatacattctcttccgctgtttgaaacgtttttcattgaaacaatttggtgatattgtatcaaaataataaagtattaagctactggaacaccatggtgtcctttcatgtcaaacgtctgaaggaatgacagtcctccaagagagattctctgtacaaatggtgtgttcccactgtcctggaaacaggagaggcttgtgccagggggctggagaagatggctctcacccactgtggtcgtcatcccttgtctggtctgtgttattaacaagtttcaggaggttccgtgtcagatttatgtgcatccagcaggcctttgaggaatgggatcttgtgtatttagcactgccacattttttctatagtggaagccatgtgaaacttagtccaaaccatatgcaggtaattaaaaaaaaatttttttttgaactggcatttatggtaactaccatatagggaggaaaacctgaagaacctggagtggttctgtagaaagtgaagtcacacctgttactttttgaaggtgaaaacatatttgcaaaggcaagggaagaggttttaaaatgcagatcaaagattcgaggggagtgaatctcaacagtattcctagctaaccacttctcatttcccaacattgctcttttttcacatgtgtgctgtctggtggtgtgagctcagtggtttctgtcccctctatcacaatattttaacgtctatgaggaaagacatataaagggaagagtcctttttttaaaatcttaaatatctcctatttcactattaacataccagttttgctgctctctcaaactggtggctatgctcagagccaccatgatggccatgcagacaatgcacaacacagtgctagggggtgcctcgattgaatgaaggcttctcccagagttgtgctgtgccaatggcacagctgtgcgtgacagccttgcctttccttatcctggtttaaacactgggtttaagaagcccttattttgaatttctgcagcaagtagcagttttcactgattagtcaggattaaactaagatagacaagtggtatagaaatcagaataagatttaaaattaccccgaggtgacacaactaatggcttggtcaaaattggtagaacttgtattaaaagggtggattttgctgtatgtaaattataccttaatgagaaaaagattcataccactcagaaaaatataagtcttagagtttgatgaaccctagtgattatcattattcactgttaatccttcaggaaaaacacaacagccagatactgagggttttttaaagaattctaaacaaattcaccctgaaatcaggacaattactgataaggctatttagggaacatttggataaaagatcaaaaactgagtttgacttttttttttacctgaattgagtcgtgaccaattgttttggcattttctgcatctcagccatatagagtacgaggcagttctaacttagtcattctgtcaggaggatagaaatactctagttttgagctgggcgtggtggcttacgcctgtaatcccagcactttgggaggctgaggcaggtgaatcacaaggtcaggtgtttgacaccagtctggccaacatggtgaaaccccgtctttcctaaaaagagaaaaaaattagccgggcatagtggygggcgcctgtaatctcagcggcaggctgaggcaagagaatagcttgaacctgggatgtggaggttgcagtgagccgagatcactccactgcactccggcctaggcaacagaacgagacttcgtctcaaaaacaaaaacagaaatactctagttttggaagacctgtttaaacagaagtgatattctaaagttcttatgttgcaaatggccattccatatggaacctttgcgttgtaatttatatatatttgattagcagcacatgcatgcctgaagctgcattgtgatggtgattttatcacagatgtggtacagaaacccacttgtagtcatactgagcagacctgtgacctgtcagagtagggatttgggaataaaaggttcgggtacaagtgtagaaatgactgcatctgctttggtgtcaccttttgtttcctatctcccaggagtgcagaaatggaaggcctgggtcctaagaccacaagtatagctgtgaaaagtgtataatccttctcccatagtagcactgtcatatcaaggccaaaagttctttttgagtttcaccacaaagcaagtggtggggaaagtgcatctagttttgctaaagtcctgaaactgctggacactgctcccattgttatgataggctggagtttacggagacagttttaaggctgggagtttcccagacgcggcgccacaccatcctctcctcacctaggtttcccttcactgctcattgtgcccacacccagttttgcagaggattttctgtgaatgtgtagtgcacagacacgcatactctctttcctaagctcgggaacttaacccccagtaagcttaagctttcaggaaggaagaaagaaagaaaagtaggtattcacaaaagggttggggactccagacgtcagcattaaaggtaggtctaaaaagggattagcagaattgcctgtgaggacaacttttgtgaagtgtagtgtatctttttttttttttttaaaccaagaagagatttaataaaacttttttttgagacagagtctcgctttgtcgcccaggctggagtgcaatggcatgatgtcggctcactgcaagctctgcctcccgggttcacgccattctcctgcctcagcctccccagtagctgggactacaggcacccgccaccacgcctggctaattttttgtatttttagtagagacggggtttcaccatgttagccaggatggtttccatctcctgaccttgtgatccgcccgcctcggcctcccaacgtgctgggattacaggtgtgagccaccgcgcccggccataaaacttttaaaaatcctgcaaaatgtgaaatattagctaccctattacagtgtttgtacattaagaagacattttgctttgaagccagattcgttttaggacttttaaggtattatcaagttttaaattggttccaagatttggaaagtacagtccttcctagagcctgattgttatcatcgggctgtggttacgaaaagatagagtgttaacattaccaaaatgaaatcagtgtcttagtaaacacagaactttttaaacacccacctttagtatgtaccgtctgaataattctagcattttcacattgattagtcttttgaaaaatcataaagatgaacaattcataggttaatgcagaaaataatgagtatatcaagagatgaaaacagtgtgcttttgtcaaattcacaaatgtcatcaaattcagaactgcccttttggctgaattagttcagcattgtaggtgtttatatttgtcttgctgaaggactgttttaggagtgttgttgtaaaatctctgtccaattcccaattagcagagtagaacttttggtagtgcgaactcagtagttccatcaatgtgatctttacagttataggaaatgaacatagtttgcccacagttcttttaaaagatctgaataaacatgagtcaatataacatttattctgtattaataatcagtacataaattaattcaacttgaaaccttttttctacagagtactatttaatattatcatctgatccatagtaatttagtactaattttaatgagaaaaaatgaaacttttactttcataatagctcatccacttaacatttttacaaagaactactataaatatgtaacactatgcaggcttttttctacacctagtcacaaatcaaaataagcatactgtttatttaaaaacggaacactttcaaactgctgctgtattcagatcaccaccttccccacaccaaattaattgctctctctgtgtactcccctctgtgccactcatgttgcagcattatccatggctctttgccttaacccaacccggtttctgttgtcactgctccctaggttgagttcttggatggcagggagcctgtctcccttatcaaatagtgttaggtatgagttatgcctaatacgtgtgttgaatcaaattgaatttaattaggacacctgaattttatgtagcttccttctaatttttgtaactaaggagcattacaaattttcttttcaaaatgtaccataaaatataccatggattgaaattttgaattatgtataagagagttcatgttacccaataaaacatcataggaatttgaacctaaagaactctaaatcttaaatgaggatttttttttaaatgcacaaatggcaggcagaaaaatcaaatcctgctatattatcagatgaaattagaaagtagactacatatttcaataaagttgacattaaaaggatcttttcaaacagtgggattctaaagcctaacaattattttttaaattctgttgtaaacctcgaaaaacattcttaactataaaaaataaggtaacttgaagttagaaatttatggatgaagttagaaatgtatggatgaagttaatgctggattgcatacagaagccaaatttggtgcctccatgatccatatctttaatgcctttagcaagcctgttcacatatactggtgaaataacaatctctcagaagtaaataaaagagattctaagactccgctgagtagtagaccaagtaagatcatcacaaacttcatgctgtcaaatacattaccttgaaggaaaattatgcagacagcttttctgaacaactccatttatgccacatgcttattattctttgaggtggaggaggtggcagggaacataatttctgtttgaaagttcttttgttttctgctacctttacttaaatgttaccgggtactatttttatatcctataaagtgctttgaaaaaatgttaagtgaatagtgctacataaaatagaggagaattttcacattctctgggttgtaagaagcaaagtgaataatacttgagtcttaaaagaggaatgataatatgctgaaaaagttaacaagtagctaataatccccctccccaacccccagctttgcaaaattctgggttcaaagagaaactgaattttggctaataaataaataaacattcattaaaagcagaatttataccacagcaaatgtaaagaaaattcatgtggtgttcctaataattattttaatgttgttaaatggacatgaattgaaacagaacttatttatattcacttaacgtttgcatataaggtcaaattgcttaaatactattacaagaaaaatattttatgactctgaagccatctgatttctgcatatttctataacaataaaacaatttgaatcaccttagaattcactgtaataggatttggccatgtagcacatataatcagattgagaccagttaatttcggaattcctttttctaactgaaatcctacttaattcaacagatattctcaatagaaaaacagaaacctcttaagaatgaatgcaagtaaaatatacatcttatcataaaaacaatcagtacattctaaccaaaaatatatatcaaaccacagtgaaaaaagtaaaaacctagtattagataaaattttactttcttaaccaaaaaattcattgcacatatttaccatttatctgtttttttaaaaatcccccaaaatatttccaataactgctaagtactatactttttgcttgttcatgagattactaaacatttacaatgcaagtgtattggcttggaggcatccttgcagtaaatgagggcaggattcttcaatacactgtaaaatgcaccaaccttagtcaggtttttaaaatggttcacttttaaatatgatagctggtagctgtccaagtccattagcaccacatatagtgagttaaagagtgttttcagagaagatgactcgtcttttttgtttttaatgtttaaaagttgtacaattaaaagaaattgacttcttgggtcatgtgttttgaatgacacttttcatcttgctcaggatttccaccctcctccccggattataagcatgaaggtaggaaaatctgggggaaatatttttgcacttcagcaaagaatcttgctaataatatccatgatttggttcaatttccaagtcagattagtttcttttgttagaggtctcaatatgtatttacagaaagaaatgaagatgattctgtaggacaaagtagcaaatactttctatatgcaatccatacacaatgcaagaattcacccagatcatttaaaatcatctaatgtgcattatttcctccaagtggagctcttgaacaaataccttacatctcatacttcatctttattacttcatctgtttcaagtagtaacacaatcactcaatttacacaatgggggaatacacactttgaatcctaacctgtgaggtagggaagtgcactctggtattatggccatttcacacaaggaaagattgaaataggattactttttcaaaaaatatggcaatcattgatgagatcagatgcttccctttcaatatgtaaataaaaatgcaaataagcccttctcatttttgtaaagtatatctggattgaaaatagtgatgaaggccgggtgcggtggctcatgcctgtaatcccagcactttaggaggccgaggcgggaggatcatgaggtcaggagatcaagaccatcctggctaacacggtgaaaccccatctctactaaaaatacaaaaaattagccgagcgttgtagtgggcgcctgtagtcccagctacttgggaggctgaggcagaagaatggtgtgaacccaggaggtggagcttgcagtgagccaagatcgcgccactgcactccagcctgggcgacagagtgagactccatctcaaaaaaaaaaaaaaaagaaaagaaaatagtgatgaaaaagttaactttcaatattcatgtaaaatgctttttactggtctcaacacacagacatgaaggaatactgacatttaaattataatgtgctttagcaataacttttcacttttctattcacccacattcatggctcatttttggccgagaataaatatttgcactagattattaggattttccaggaccattactaccaggctggctttgaatctactctcccctctttggagagaagttgatgaatatggctcttaaagaagtaattctgcaagatgaatcctatattatctgtgataatttacttgggaattttcccttctcctggatgaagaataatattccccttgttttgtttttgctgtttcattttttaacttttcacagataaatccatgcagaaatggatatatacagatctgttgaggcagaaagaaaagcgggggaaaaacccactctccctgtttctacacttttgcacttagtaacaatttgcctgaytgaaggatttgtgaatggttctctttttttttttttttttttttgagaaggagtctcgctctgttgcccagactggagtgcagtggtgcaatcttggctccctgcaacctccacctctcgggttcaagcaattctcctgcctcagcctcccaagtagctgggattacaggcrtgcaccaccacgcccagcyaatttttgtattttcagtagagatggggtttcaccacattggccaggctggtctcgaactcctgaccttagctgatccacccgccttggcctcccaaagtgctgggattataggcgtgagccactgcscctggccaaatagcgcttataagagacttaagactaggaaaccactcacgtttaatatcaatatgcatattctgcacactatctgctgaaattgggaaaatgcaatgtattttttgagttaagcctgctgcttaggaatgtaacaattacaaatcacattcacaaaagtagctcaccttattcaccattttaaacatatatgtgcactgtaaaaaataagtttttaaaaacttaatgtgatgttagcctatacacagagctgaattatcaaaaggaaaccagactttgttatatcagaggtcattaaaaagcttatggcataccataagtgctcaataaatacaccttcctcccccaaagcactccaatctccatatgccrttttagcaactccctgtatgttatgtcattttacactgcaatctgtgctgacttcctccaatccagaagtgactgcatttcagtggtagagttttataaacttgacttaatctttagcacttctgcgctggaattgtaccttttaagttctagagatgataaatctctcatttgttactgagtaagaaatgccacaaatgtataaaagaattcttcattaagcttgttttttctgccgtgactctggagagtaagtcactgtagaagattgtttattttattatcatcagaggccatttcattaaccagctgttctattgacaactgaatagcattcttgactagagaagaggctgtttcaattaagagtgtttcatattgttctgaagttctatcctcaaaaccattatcattagcaaaaacccctacttgctcattttcagctgaaattaagaattgcttagggacatttttagattttgtaacatcaaattcactgatttcagtgtctgtaataataatagcaattggctccattcttttgctttcttctgatttggatttctcttcagtgatcccattttctttaaaatctgattyttggctcaattcagtatcttttggcttagtttcttcagctacaatctctgtactttcatagtcttttccatttggtgcactttctagggtactgttactggcttcttccacaatttgttgatctggaattgcaggtaaaggaggaacatcagaaagtactggctgctgatggtctgtttctgaagtttcaagtgggcttgcttgctggggttgaacatcttgtttttccttgatcgtttcaatttcttcaaggattagagttcccgtttgaatagsagaatgcccattatctaatccaagttctactgaaatcactttctctccaraagttrtgctattgctcacatttgattcacagacctcatcaccatctttcygtgagatgccttcacttagatcctgggttgacttagcctttgttgcctgatcattcaatggggtctgtgtttgtatatccaaaatttcagcttcttcctggactttgatgctgcagtctgagtcttctataattttggaatgattactcctttttggccctcttgggaattttatgcagggaatcttaagtctagattttgcctttttcttagaaagatcagcatcctcagcatttattgcaggttgcatttcaccctccaatrgcttttgctgctttgaagactctgaccttttcctgcgtgtkacaagacgtttgagtgaggcccaggccccccgtgtgggctctggctgatcagaagctcctgcttcttgtggacacttccttgccacatcagcagcttcagagccagctttgggcttcagtgctttggctgctttctttcttctcttgaagcaaagcatggatgccttttccttctgcctttcagccccaggactaccttctgctgatctcttctcatccttgttttctacatgaatttctgaaattgtggtttccatttttacactgcactcttattctctagaaaactgtattctctcttccttagcagccttttgtgacaaaaagatgagcaaaaatgtcacactaggtamaatttcttccaggcatattcatacctttcatcttactccatacagttgttttaggtggtttctctagtatagaaatgcccagtttctctatggcttgtaatttctctctttaatttcttgatgaaagcccttctttggataaatttttgctttatttaaagatcaacctgatgagagaaaagaaagtggtattttatttcactatgagcctattattttctgtggagactatttcagtgaatgtataagattctaccaggcatattttccatataataacttaatgaaatgactggagaataaacattggggtttactttggccctattaaagagttcagtgtgattctattttgttttatcctccttgttgaaacttcattttggattaccctgcaagtctgatattatcagttctttagttgtgttgtctgtgtgaattgcttatgactctaaagtgcaagttaagcaaacaacaagaaccaaaaatgaagtgcaggatgaaaagcaagctgatgtaatctttatcacactcaatagataattttaaagctgcaaaggactttagagattatttgagattactcaaatccagccagatgacaaaactgaactccagaggggagcagttgtcttgtcaaaagccatgcaactagataaggtcatagccagagttagaactagagactttgactctctagttttaccattataacataaggtttctgttctaaaaatgtatgttccatcaaggaagtgctatttttcatacatattcttaggaaaatttagcattactgtcatttcccactcttaaattagttgtacaattttgacattttcatttaagtactgtatctgctgtatcacatgtttccaccataatctgcacatagttggaagtcagtaagagtagtaatagctgacatttattgagcaattcttgggtattaggcagtgcatgcacttttacatacatctctaatcctcaccacaatattacaaagatggtggtatcaccacgtacagatgaagcaatttggctgagattacggcagagctgtaacagagctcagattaacacaagattgcttgttgcttaaagcttatgttctgaaactgggctttaagagtttcgtcagaaaatgaattgtttggggatactaatctgcagtgtttcattagtaaaaaaattaaaaaattgattaatggtcatttaaccataaggcacttatcaactcataattgaaccacgagtagactgagttcttgtcatttgaaaaccaagcttttgaaattctttatattttatttttttggttcaggaactaatttaaaagccaaaaataagttggcaaactatgcaattggcaaacttagataatataaaggtgtattgaaaatttaatccttagaatggtatgatggcaccaaagaatggaaatgggaggtgattatccaacaaagatcctatgaattttagtgggtggatgccctaaaataagcaaagggactcattctttatattgtttttatgtaaatccttcactgaagtttcatttgggtaacccataattttatgaactgtagaaggaactggaaccctgaaaatcagtttatgatctaagtaaatattatcttaggttgggtgtttcatactgtrtgcctctaacagaaagataaagtcattctagaacaatgacggaactaaaatatgaacatttgacagtgtttctcctcacaatgtttcagtgagcactagaacctaagctgataactgtttaaatcttctcacctcttgtgagttttcagcacctgagcatttttgttaagcagaggctgtattaccacataatagaaatattgaaatgagatgtttaggagtctgtcattggaaactaacctggattgcgcaaagacaatcgtttgagaagctcacttgaatgtatctcacatactagaaataaaacgaatacccaaacagaaacttaactaacgagggaaaataatgcagtctgtagacaataaaactttgcagaatgtcagactgcaaatgattcgctcttaaccagcaagggtagctttatcgcctcaggaaatcttaaagtccctgtgctcatttcctgatggaattgcaagtctcatgtcacagaaaacaccccctttcctttttcccttgagcagccagtacccgaggaaagcaatgcatctttcccagcaccagatacggaccacgaagcttcctcctggaggaaggaatctcgaattctggcttgacgccccttatggcaggagacagagcgcaggataaagtactcaaaaaggaaaatgccgggggcgtggaacagataacccagcttcaggctgtctgcagaattataatgtaatggccagaaacccaaaatcacatttctcaaagagggataaagaaggaaaaaagccaccggcaacccatgcttctaagacaagctgtaacgcgaaggggataggtgggcagacctgatgagggtcgccctggccgcggattccagcggacaagcgacctcccgcgttcttactcccagcacctcagagggctcggataccccgtatccagtgggcacctcttgcccactccgcggtccgcggaccggacattgcccccgaccctcctcccccgcaggctccccgccctgcctttacttacgtagggcgtcggggtccttggccaacactgctcccgaggtggcggcgcgctcgcggggcccgccgcccaggcctccagggagccgcggtcgcacccggagcaaggcgccctctgcagagcccgccgccgggtgcgccccctccccaccgcgcggggacagacagcaggcagcgccaatgcgagcggagcggagcgggcgggcaggggcggggcgaccgcsggaggcgcggggcggcgcgggcgccgggacccacctgcagcagcagcctgcctgcctgccgcggggaagcccatcgtgctccgcccgggcgccaatctccactgccagaccacatcagcgccgaggcggggaccgcaagagagccagccggaaggttcggggggcgggggaaggcgggggggaccagggcaatgaaccccgcgttttctgagacgctaaatagtgaggtccggtttcaaattatagacagtcgcattacacatctcctctcctccccctcagaatatttaaagacaaggcagacatcgcattttaaaagcaggattcaaaactgtgcatagaatagcgaggtcatgtttgtttgaagcgaaaattacatatataaatggaaacagaaagaaacccgactttctcaggagtggcttgagtgtcagatcatcgtggttcatcgccaaacaggctttcaaacctttgtctcccagtgggaagcaggtggaggtgattggtgcagaactttggcctgcaggagcagctgcatctctatgcggacaaggtgagaaaggcacaggaacccagctccatccatcttataccttacatagttccaaaaataagttgaggtagcttacaagttacccatgattcccttcaggacattccctatgagggcattcctgggagctccagctgtaaaatctagtaggatccatcacaatcccagcctcctcctctggcccccatagcatagcatccagatgaagaacctggtaaggtgaagtgaagaactactgaaaagcagccgcgttcatctcctttcttcaacaggatcacgaccttagggagtgtaaatgtcaggtgtccatttttgtattttttccggaaatgttttatatttgtaagattctgtagtttccacagaggcttatcaaggaaagaactcttgagacacaaaagcaaagccaaatataagctgtcaagatcttaaaattacagataaaagaggcaagagttgtaaaacaggaaaatccataagcatctagtttagttgtaattaagaattcagggatgggcgcagtagctcacacctgtaatcccagcactttgggaggccaaggcaggaggatggcttgagtccaagagtttgagaccagcctgggcaacatagggagacaaaaaaatctaaaaaattagctgggcatggtggtgcacgtatggtcccagttactcaggagctcaggaggctgagaagggaggatcacttgggcccagaaggtcaaggctgctgtgagccactactgcaccactgcacgccagcctgggcaacaaagtgagaccctgcctcaaaaaaaaaaaaaaattcagtcagccttgttcactcagcaaacacgtctatcgaaatggtctgcgtatctctctatgggttgctagcgctgcttgttgccagttttgaactttaagccaaaagaaatccattatgctyataagcaattgagaactattccttattgagatccaaggtttctcaaaactagcagacctgggagtttgcaagagtttcaggcaaaaaataagatgagcttatttaggtgaagacagggtaaaatagctgtcttatttttatttttatttgagacagggtcttgctcaggctggagtgcagtggtacaatccctggctcaagcaatcctcccacctcagcctcccatgcagctgggaccacaggtatgcgaccacatgcccaggttcttcttcttttttttttttttgtagagatggcgtctccctatgttgcccaggctggtcttgaactcctgagctcaagtgatcctcctgccttgacctcctacagtgctaggattacaggtgtgagcccccatgcctggccttcacttgcctttcttttaaacaaaattagtaaaagggaactgaaaggcagtttgaggtgagagatgaatttatttagtatttgaagggcaaattcggacagacttccttaaggtatattacaaacaagtcatccctgacctccaccaacacacatacacacagagtcactcacacagagtatagtactataaataacatagcgcaccatagtttttctttaggatatgactagaactcaatgccatatgtgtgtgtgtgtgtgtgtgtgtgtgtgtgtgtttaatgtatccagtacctcatgcatgaaagaaacctgtcattcctgaattcaggtaagtgacaacgaaggctgtttaagctattacccatatcattgtctactaccccattagtagcttttcattatataacaggaaataggctataaatgtatttctgcaatctgatgagaaattatcctacctatagcttatcatgttaatatcactagatacagtgtgccagtaaaatagcttacatatttatctgagcaatactctactgatcttaccatttatcccatcttgrtctctacccattgcctgggcctatagctaccaaaaatgacttataactccttgttaatagctcttacatttcagaggccttctgggaataagccctccaaccccgttccctgggacaccattgaatgaacctgaggctccaagtctctggtggtttcatctgttcctgggcaccatgagggttgcacagagccaacacaaactcaatagtaatactgttgcaatctgtttaatgtggcagcacataaatgctatctcttttgaattaagactgtgtgtacatcttcagtgcacagaaacagcctctgaagtgagatcagagaatgtacaatttgtttatcagtaatattactaataaggggaaggaaggcwttagcagcccagagaagagaaagggcacgggaaagccactaatctggagggactcttagcaccaaggtaaaggcactagaccttctctgccagcacatgctaatagttaccccaagcactaatgcttctataggtcttttttattttgacacagggtcttgctctgttgctcaggctggaatgcggtggctcagtcatagctcactgcggcctcgaactcctaggctcaagcaaacctctcacatcagactcccaaggagctaggactacaagcgtgcaccacacactcagctgagttttggggttttgttttttgtagagatggggtctgtcttgtccaggttagtcttgaactcctgggctcaagtgatcctcctgcctcagcagcctggacaagacagtgagaccccatctctacaaaaaacagaacttcaaaactcagctgagtgtggtgggattacaggtgtgagctaccatgcccagcccctaccagtattgaggatttaaacccatgtggctgttggcgatattaggaaacctaaatcctttaagatgatccttaagtcaccatatctgacaagactgcatccttcccttgtctacaaaatgaattcccagcaaatcccattccaggtgaagtttcacaggacattaagaaatgtaccagaaagcggtcgggcacagtggctcacgcctgtaatcccagcactttgggaggccgaggtgggaggatcacttgaggccaggagtttgagaccagcctggccaacatggcaaaaccccatctatactgaaaatacaaaaaattagccaggcatggtggtgcgaacctgtaatcccagctactcgggaggctgaggtsggagaatcgcttgaacccgggaggcagaggttgcagtgagctgagatcacgtcactacactgcagcctgggcaaaagagcacgactcttgtcccaacccccctaccccccctgccaaaaaaaaaaaaaaaaaaggaaaaaaaaagtaccagaagcaattaactctgcaaacagggcctggaggatgctgtgcaacaggaactgacaagtgcttacaatgtgccaggccctgtacaaagcatcttagatgatgtgtttgagtaattccagaaccgccctcacgaggtaggtaccaacagtgctcctatttccatggtgaggatgtggaggcagggaggtgggtgaggctctctgccatagagctggggctctgcactgtgacccctttgccatatgcctctcaaggcagcgctatcatttctgtggactgtaaaattgactgtattacaacattgacatggacctagggaattaaaaataataaaaccaaggtcactgggaaaaatactgctttgccaacatcagcagtgtttagcactggcgccagtgggatgcagcatcctctggaaggatccagtggagggagacaaggggaaaaagggaaggaaacaaatgggagaggaagaacagagatagaagataaagaacaagaagagaaggaaaaatatttgatttatttttttagacagagtctagctctgtctcccaggctggagtgcagcagcatgatcctggctcactgcaacctctgcctcctgggttcaagcaattctcgtacctcagcctcccaagtacctggggttataggtgcctgccaccacacccagctaatttttgtatttttggtagaaacagggttttaccatgttggccaagctggtcttgaaccccagacctcaagtgatccgcccacctcggcctcccaaagtgctgggattacaggcatgagccacctccacgcccagccagaagaggaggaaaaaaaatattaggttggtgcaaaagtaattgtggtttttaccaacctaatgttttaggaaaaagaaagtctgggccaggtatggtggctcatgcctataatcccagctacttgggaggctgaggcaggagaatcacttgaacccaggagacggaggttgcagtgagctgagatcgcgccactgcactccagcctgggcgacagagacactgtctcaaaaaaataaaaataaaaataaaaagtctgtagggaagggtggagcccaggcatttagaagaaactcaatgaatacttgctgcaccaacagaatagaggctcacctaaggctaatgctgcatgaccatccttcttgagcactctaaacatagacagtgctaaagctgtgacagaaatgggaattccaaggaagttcaggcaaaaacttgtataagcaatacttcctcagggtagaaaaacaaaattcaacaatatagaaaggtataagattaaaaggtaagtcatcaacttccaacccaaccctctcaggaggtcccctgaattatgtgtcctctcagaaatacacaagcatgcatacatttccctctaaacacaacagtatcataaagggcacactgcaacttgcatcttcagcccaagggtctgcctgacaaatgagctcacaaaggatggcagagacctgtggcacagtctgttaaggctgtaattcatattgcaacaccaagatggcaaacttgtttccttttattctgtggaacgtcactaaagtaaacagacatgcatgatttatgttaatttatacatgatgagaattaaggctgaaaatgacktctggggaaactcctactattagtttcagatcttctggrcaggggctgacttctcttggcttacttatacttcctaactcccagtgggcctgaatagacactggccagactttyaaagtagcttcttgaagatggatggtgatctggaaggaaaaacaagaaataaatgttttctctaagcactgaaatgtttcctgttccttccatactgcaccattacccactcacattgccaaagctgttaacatttacatcctttcctgccaccagctcttctagggcgtgtccataaatggacttgaaaatgatgcatggtatttccatagtactgtgtgaatactgttcaagaccagaccaagccgtgagccatgactgcatttcgagtatcacacataccctctcaaagaatagtgttctagcatcaaactacagtttgcttctacttggaccttaactttctcaaataatgcaagagcttttgttttatactatgaccctttgatatccttgtcttttctrgctttttctagtttttctcaggtgctcccccaacctgttccacacaggatttgtaacttcaggtcatttgcatggttatcagaatgccccttcgctaatgtccaaatgagggttcagtttcccaaaactcacgtcttccttttttcttggttaattcctcattttgctaagtacattgctaaataacttcttaggaagagatgtggggtggcaaacccttgcacgtctgaaaatatccagatagattcggctaggtgtgagcacatgttgaaagtcatcttccctgtgaccttacaggacactcctccattgtctaaaagcttcttattgccagtaagacgggcgttaagtctagttctcattcttttcataggcaagccacttttttcgtctctggagaaagatgttaggattttcatgtttgatatttttgcagtttcaacaggatgtgtctagggatataagtgcacactgcaacttgctgcttcagccccaagggtctgcctaaggagagacacgtcctgttgaaatttcaaaaatatcaaacaatgcaatgtcactcattgcagtcggtactcagggccctttcacctaaggccctaagaactgccagattggtcctgtttccttctcttttctattatacttcctaagacatttgctaattcttgccttctaactacctattcagagtatacagaccgtcagctgttcctgacctgcaatgtgtcatcaactctgaaccccaagcctcctggggcttcagcagagggagtctaacctctcctgtagtttcctctgtagtttattggacagcagttttctcccctacactgtcaacctgtgacaagccatgctgcgcttcttccaaaaatgtgttgaaatataaatatttcaattcattggttattgccaactctcattactatcccctctcccctcagggaagtctgaaaagaaatgttttgaaagcattagaatgtgaatttttatagcgtcagtttgagccctataattcataaataagctacatgaggaaaaaagccaaattattacccagtaacaacttacctgtttagaataatccattcacctgttctgtttcarggtccaaatcaatatcataaaaacagggccgggtggggagtccaggcattgtgctcatctaggatgtaaaaaagcattacaaataaactaatgctgggcacagtggctcacgcctataatcccaggctgagrtggagaggatcacttgaggccaggagttctaaaccaccctgggcaacatagtgagacccccatctctacaggaaataaamaattagctggatatgatggcatgtgcctgtagttccagctacttgggatgctaaggcaggaggattgcttgaggctaggaggttgaggccacagtgagccatgatcatccgattgcctgggcgacagagcaaggccatgtctaaaataaacgtaaagtcatctttactttcacttttccttcagaaagaaagcccaaggcataaagatagaacatcattttatagttgtcaataaagtgggtactcttgttacatattaaaaatcaagtcactgatcctgttaaaaaactcagaaactgatccctgccgggcgtggtggctcatgcctataatcctagcactctgggaggccaaggcagatggatcacctgaggtcaggaatttgagaccagcctgaccaacatggtgaaaccccatctctactaaaaatacaaaaattagctgggcatggtggcgtgtgcctgtaatcccagctacttgggaggctgaggcaggagaatcgcttgaacctgggaggcggaggttgcagtgagccgagatcttgccactgcactccagcctgggtgacagagcaagactccatctcaaaaaaaaaaaaaaggaaaagaaaagaaactgattcctcatgtccttctgcaaaccaaatgccagccttcactatcatcttccatgtggtcacaagcagtagcaggaggtgtttccaccttcaccttacaagaatgagtgctggggagtagaggagttgctcactcgcctcctcagctcacgctttgcaagaccaaaaggaggtacagggcttgyctgcttttaaattttgtttcgttcagtcttgctagctgagctgcccatgtgatttttgcttcagcaacacgatggtaggagttagtatcctttaacttgggccaagacacttttgtacataatctagatggttttataatcaccattcttactggcccaaaatggccttctaaaactaaacttgtaatgcttacaaattatatttgtactcactacttttctaaagactcggctttgacaaatttctacttagatgcaaatatgtacggcttgcaagtgaaaactccgtatatttttatctgtaacaatgtcctatataatgaatacacacaagttccaaatcaaatctagacaggaaaacagcttaggttacttctaaaacttaactataaaaaggttatttaaaaagagtcatcttctgtaacacaaaacatcatcaatactttagaaaacctcattctgactgacttctgagtaccaatcaatattccccaaaacacattatagggatctgacaactggtttatattcttatattgtgtaagaggtaaggaggtgctaggtgtgagacaagtaggagagaggaaaggatgggtccttagacacagcagaaaaaccggaagatgacattataaagataaaagacacatgcccattgttgtagacgggcatgtgcatgtcagcagaaaaccctaaagatggttccctaaacagtgatgagtaggatttttgatattttcactcattccccaagaggattttccctcctaaacactggtcactgataatcagaaaaaatacaaaaaaagacaatattatgtgtacgcacatgtatgaacctagatataaagttctgaaaataagccatcacactttgaattaatatagaaaatattcaaataatctgagtctcgttaaggccccaacggcaactggaaggtgttagaatagtgattaaaccatttgatcatgtgtggaaacgccttggtccaacttaaagttaaaagcctctgacacatactttgttctaaatgagaaagtcttgagttcggcaggctgtgtctctctccaccttacagcctgactctcactggcctgactgcttccagatttgctttcacctctactgttacccttttcttcatgtgaagatcaaaagtgacaagaaagagtacagctacccgtctttcagctggtagctgctgacaacttctccaaaaagaacaacacatatttctgcactattcaaggtgctgggtaaaaatggtggaaaattcctaccacaagggatttctacaaatcctggagactgatgtacatcatagcaagtctaagccttctgctctctatagagagctaaggaggcagtgagatgcaggcatttgtgctaagcaccactgtgatgtgatgatgttgcctacagtgtgagctgagggcagcagggctctcacctttcataatttgcccaaggccaagatctgaagaggtgaaaatgaattcagctctaatgtcctacgttttcaactctataatgccacctcctaccactttcttactatactgaaagaatgacataaatccaaaaggatgtatgttggtttcttttccatgtgtgttgatttagtttaatatttcagtcctgtattgcatggcagtacaatctgtagatacaggatacagggcagatttaggggataacctagattcaggatccaagttaaccttggaacaatgtcagcccaaactatgattatgtccttaagcatccctcccctctgcttcccaactggcaatattcttctttgaatatgcataaaatctgtaagataagaaagcaatggacaccttgttcaccttgaagcgtaaataagcaacctcacctttcatatctcaagggtccatttgcattttttaatggggaaattccttacttaaaaataatgaaccccctgaatttcagacgtaagttctaggcctgtcagtaaaacctctgtccctacctcctagggctgtggggggactgagttaatctatgtaaggctcccaataaacattaactgtgattatgttagcactaccccagcctatcaactgggctcatcctagattcagtgaagagcatactgtccctgggaaacagaattttttattcagtatgagtagtcctggcatcattcttgatttgacaccaagatggtccacagcaagagctatatagctcctgctttatagcttatgatccacagcaatcataataggcccgattccaattttcttctgggcagtgaactctgctcacttggcatttgcttgatggtttcggcaacacacttcagacgagaagtgcagatgcgcccactactcccttgcagcatgcacttaccgttcctactaaggggtacagaaaaccagccccaacgctggcgcggatgtcgcgaatgggcagaatgaagcctgtagggacacctttttgctctgggttgtgagacaaagacaagtgtgttttagccatgcagatggggagattcccaaagccctggggaaagaagggaagagagggaggacaaatgaaaagatgacaacccagcaatgaccatctgggccctgtgattacatggattcttcaatttattcgaaacatccaactccctttatatacatctctatcttgctgtcctccagcttatttattaagccaaaaaaaaaaaaaaagaactgttgggtgagggagttaggtactcacaactgtagtccacaagtgaatattttatttccatctatggaaataacataaaactaatttaaaataatagtttggagtagatatgagaataaaattggagagggtcaggtgcagtggttcatgcctataaattccagcactttgggagactgagatgggtggactgcttgagcccaggagttcaagaccagcctgggcaacagggcaaaaccccatctcaacaaaaaacacaaaaattagccaggtgtggtggtgcgtgcctgtaggcgcagctactcaggaggctgaggtgggaggatcgcttgagcctaggagtcagaggctgcagtgagctgaaattgtgccactgcactctagcctgggcaatggagccagaccctatctcaaaataacaaaaactggagacgttctcaatattttggtaagacattctgtatttcctcatggatttctacacattcatataacgcctatgggtaaataaagaaccagggactgtgccacctaatccaaactcagtatttcagaggagagaaggctgccacccagagaagtgaagcaacgggtayttggcagggctgggaggacccagagattgygactccaagtcctgctttgcaaagagttgaaaggacaaactaaccaaacatctacctgcttcgtgtagacttcagctttgtgttgagcttcgggaagtaattcaatgtcatctgctccatagatcttctgtgcaatgatcctgattttatcctcaactgggagctaatgcacaagaaagagatggggacaccatgactggacacatgtgaggacatttaaccaggacatagccacattctaggtcagagtccctaaaaggggcagaagatggtttttatatacatatacataagcaaatagtttgaggttgatgattgggttaagaacactttctttttgtttttttgagacggagtttcgctctgttgccaggctggagtgcaatggcgcgatctcagttcactgtaacccctgcctcccaggttcaagcgattctcctgcctcagcctcccgagtagctgggattataggcatgcgcaaccaagcccggctaattctgtatttttagtagagacggagtttctccatgttggtcaggctggtcttgaactcccaacytcaggtgatctgccagccttggcctcccaaagtgctgggattacaggtgtgagccactgcacccagccaggaacactttcttttaatatcaagcctcagattttataagtgaaaatgtcccacagaggtaaagtttttatatctatatatgcagatatacatatacacacatacatatatatatagatatagatacacatattaatatatattaaggttttaaatatatacttacataagtacatatttaaaatctctcgctaagtacatcataaacagtgttgctgactacccaagaataattatttcttcataaataaaaagtagatgttcaggctgggtatggtggctcatccctgtaatcccagcactttgggaggaggccaaggcaggaggatcacttgagcccaggagtttgaaaccagcctgggcaacatagcaacactctgtctctttaaaaaataaaaattttaaaataataataaaaattaaaaagtagatgttctattctaatactggagatcagtcctgtcaaaccagacctggggacactgtttatgaaataagacaaccaatgtccatctacataactcccagtctgtatatgagaggcagatgccacccttaacacaattgattaagtgcaagcaccaggaattaggaaatagtcataaaatcaaaatcacccaggtattagaaaaaacaacccagtgatttacatgatcaacacgcattgggcatgtccactttctgtggcacctgaagcaaacagtgcagtggacagagaccagtggtctaactggtgagggcctcagtcccatgggctgtttcctccggggcaaagccttcagagaagtggagctggcttcttaaatgctgtgtagactagttcagggcattaagattcaaagagaacagcatacggagaggttgcctaaaggaaatcagaagcaaagctactcatgggtaatttggatgagcaaattacaaaaattaggcaatatatctgtctttatagcaactaaagctaaaagaacatattaggcaggttcttatttatttgagacagagttttgcacttgttgcccaggctggagtgcaatggcgtcatctcagctcactgcaacctccgcctcccgggttcaagagattctcctgcctcagcctcccaagtagctgggatcacaggcatgggccaccatgcttggctaattttatatttttagtagagacggagtttcaccatcttggtcaggctggtctcgaactcctgaccttaggtgatccacccacctcagcttcccaaagtgctgggattacaggtgtgaccacagcgcccagccaagttttgtttttaaaaggagcaataatctatctataaaaacaaaaattcccttttgaactaaacaatgataatttatgaaggggctttatataatgggcatgaataaagtgaacattcaataaggactttataaagatgaaacacagattattttcatatgcatctcataactggagctctataaatgccaaggcacatttagaacttctgaagcaaaagcactttggttgaagggtgatttaagactagcagacgctgagtaagacaaaaagtggcagcctcctgtttgccagaatggataaaagttgcaagtagaaaygggttctaaagtccatatgtccctgctctttcaggtctcctgctggttttcaaggactgggcttccagccttgggtgctatgcattggagcctggagagggtgcctataaatgctttgcatttgtgtgcaaatttgtgtttatggcatttttctaaaaggatgattgctgaacagattttaaaacttgcctataaaatcaaagctcaacaggagaatgtcaatgtcaatgttaattaactgtaagtgtattatatctgcaaggggcaaagagaaataagagaacactaaaactcaagagtaataagtttattccttctgcttttttatggctgtttttgaaagtctatgattatctattaaaaaccaagccaggccaggcacattggctcatgcctataatcccagcactttgggaggctgaggcaggaggatcacttgaacccaggagttcgagaccagcctgagcaatatagggagacccagtcactacaagaaaaataaaataaaataaaacaaaattttttttttgagacgaagtttcgcacttgttgcccaggctagagtgcagtgatctcagctcattgcaacgtccgcctcccgggttcaagcgattctcctgcctcagccttccaagtagctgggattacaggtgcctgccaccacacccagctaattttttgtatttttagtagagatggggtttcaccatgttggccaggctggtctccaactcttgaccttaggtgatccacccacctcggcctcccaaagtgctggggttacaggggtgagccactgtgcctggccaataaaacaaattagccaggcttggtagtacatgtctgtggtcccacctactcagggggctgaggtgggaggaccacttgggtccaggaggttgaggctgcagtgtgccatgattgtaccactgcactccagcctgagcaacagagcaagaccctgtcttaaaacaaaaaacaaaacaaaaaaatcaagccagaaactagcctagagaataggaaaaattaactacagcatatatctcatattcctaacaaagtttccagttgttgtttccatactacttaatgtcaaatcacatcctgaaatacactggacagataaatgaaaacaaaacacaaccctataataagaaccttttcctgaactaactttattgtatcatagagtaagcagggctctacttagaccaggtgtaatttaatttgcttagtgatggaaaaaatgatgaagcttcctggagtactttggttttgcatgtgagggccctcaacttgaggcagcaccttaccaggaagtgaacgtgggggcacacttctttcccctattactgaaaagccatcagaaaaattttgtaagctcgatgcagccccttaccaatctgctacatggttggtgccttgttttaaaggctacagtgaattacatatttggtctatatgtaaccttctcttctgccacctgtactttgacccttttcgaagttaggatatgagcaacggttccccctccaccctggggtattcctgcttaaatcccctctgtaagtaagcagtggcatatgtttataagaaggctgtctgggcggacgcagtggctcacgcctgtaattccagcactttgggaggccaaggcaggtggatcacgaggtcaggagttcgagaccagcctggccaagatggtgaaaccccrtctctactaaaaaaataagaaaaattagctgggcacggtggcagacgcctgtaatcccagctacttgggaagctgaggcaggagaatcacttgaacccaggaggcagaggttgcagtgagctgagatcatgcctctgcactcgagcctgggcaaaagagcaagactccgtctcaaaaataaaaagaaggctgtctacagctgggagtccaggctgtggttgtgtaagtcacctacgtgggaatcaaaccgcaaggctgaagctgcgaagcatggggctctaatagaagtagccacacagaaacttcactgtgcccttttcgtcttttttctttttttgcagacagcaaatcacccaccttgaggtcataaaggagctggaagctgctgggtgcttgtgctgctctctggacggcctgagccagggctaaggcacmcttgcccccttctgcccagtgagtgcacttcacggcatcaaaagccccatgttctctggaaaggcggctgatgaggtccagctcagactctgtatccgtcctataaaggaagcatttcatatcaaagcatggaaaatggctggagagacagaattgtcttctttttgccattaaacctcatgtgaattacccactgataaacgaacactaaccaagaaatttggcctgggtttgaatctcagctccgaaacttactagctggtgacttttggccagttacctaatctttatgtgcctcaatttccaccctggtaatacgcgaataatcacagcacttatttcattgggacgttatgagactcagatggtaaatccatgtaaaatacttggaaaattcccagcactccagaaggaatcagtaaatactagcatttaagaattttgctggctgggcgcggtggctcacacttgtaatcccaacactttgggaggccgaggtgggagaatcacgaggtcaggagatcgagaccatcctggctaacacggtgaaaccccgtctctactaaaaatacaaaaaattagctgggcatggtggcaggcacctgtagtcccagctactagggaggctgaggcaggagaatggcatgaacccgggaggcagagcttgcagcgagtggagatcgtgccactgcactccagcctgggcaacagagacagacttcgtcccccaaaaaaaaaaaaaagattttttgcttcccattctactacggtgaggccattataacaaaaccctgaccaccaatgcaatacctaaacaacccacacaagttcttgcatgaccccttccagagtaatatgcccaattctttgtcaagacaacatcccaccagatctagtaaaataatggaacactataggcctatgaccttctgttagcataaaaggcctctaaagatgaaaaaggaacattgaacttcaggcttgtgtgttacttcccccagtggaaaggaaaagggcccataggagctgaatctgactttgggaccctcagtgggtgaggtggtgagcccgcagtgacgtatgcaatgcctgtcacagtgcaggctaaaaccacaggctataaccaatagcagtaactgaaaaacaaaataaagctaaaagcagtgctgtacaatcagctccaggagattttccacattcatccttttcgcttacactctacacttacttgaatgcattcacggccactactactggaattccaaacattctggcattttcaatttgtttcttcaagttactgaagcctttttcaaccagctccaggttctgtaaaaacaacagtgaaaggcctatgagatcagagagttgaaaaccactgcaggttcttcttcaaaggcaaacaacctccttgagccagcagccactcactatcaggacaaggaggccaagaaagaagagagaaggtcccttggtgcattttttccagtgcggtgagtggatgctatggagaactgcagctttcactccagcctatgacactagagtagagctctgcttgtttcccagccttcaagaaaaaaagagctggtatgtttcctgtcattatgccacatcattatagcttatttgctgtttgaaaggaattagttacccttacccaaattatatttaccaattgtgtttatagattttatgtattcatagggttatgataatacaaattaactctactctgcacagcacagacccttccatcagaagacagagcctaacaacatagtggctggcacagaagaggtattcgttatatggctgccgtaaatactgccaggaaatatgaagtaagcagtgatgttttcaaaggttttaatgaactcgaccgtgaacgagggcaagaaataagataaatactatctttaggaatcaggccagtggctgggcccagtggctcacacttgtaatcccaggactttgggaggctgaggcaggagaatccacttgagcccaggagtttgagacaagcctaggaaacataacaagaccccatctctacaactgagaagttaattaaaaaaaaaaaaaaaaaaagggccggacctggtggcttatgcctgtcatcccagcactttggggggccgaggcaggtggatcacaaggtcaagagattaagactatactggccaacatggtgaaaccccgtatctattaaaaatataaaaattaactaggtgtggtggcaggaacctgtagtcccagctgcttgggaggctgagggaggagaatcacttgaaccccagaggcggaggttgcagtgagttgaaattgcaccactgcactccagcctggtgacagagcaagactctgtctcaaaaaaaaaaaaaaaaaaaaaaaaagaactgagctggatgtggtagctcacacctgtaatcccagtactttgcgaggctgagatcggaggatcacttgcacctaggagttcgacagcagcctgcctgggcaacatagggagaccccgtctctacaaaaaattaaaaaattagcctggtgtggtggcgtgttcctgttcttccagctagttgggaggttgaagcggggagactgcttaagcccaagagttagaggctgcagctatgatcacgcctctgcagtccagcctaggtgacagagtgagaccctgtctgtaaaaaaaaccccaaaaaccggctgggcgtggtggctcatgcctgtaatcccagcactttgggaggccgaggcgggtggaacacgaggtcaggagatcgagaccatcctggctaacacggtgaaaccccgtctcaactaaaaatacaaaaaaattagccggacatgatggtgggtgcttgtagtcgcagcttcttgggaggctgaggcaggagaatggtgtgaacccaggaggcggagcttgcagtgagccgagatcacaccactgcactccagcctgggtaatagagccagactccatctcaaaacaaaacaaaacaaaaaaacccaccaaaaaccaagtactacaaactaaagggaagcaattaaggaaatgtatctttaagtatgtttactgcagccctgcttgtagcattggaaaattataaacataaacctcctccaagggggactgggccaatgaattatgacatatacactcaataaatatttatcatgcagatgttatgaaagtgagacccatctgtgttaacatggaacctgtccaagatgtactaaaggtgcaaaaccatggagagcttaattattccattttaggacaaacacaaaaatacatgtatataattcatgaaaaatttttaaatgtcgagaaatatgcaccgaactgttaaggggactcaactcacatatattacattcttataatgtttaattattattttttacaaagggtatattactattgtaggcttaacaatacattaaatattttaaaaataaaagagtcttctataaaaatacatatactgaatcatcgagcaaaacccagcactaatgtttgttgatcccaaaaaagcagaaataggtaggataaaaggtggaaaacaactaggttcattataaatgtgatttatgcttttttcctttaataattgaaaactgagattatgatttatttgagcttctaaagaacactgctaattctttacctctagtcacatgaaaaccaattaatatgtaacgctgatcaagaacagttttaaataagtagaatttcttaaatgaagacaccagctgggccagctaggggcagtcactgtaattagacacaggaaaggctgtggggtggcaggagggccagaactgtgaattcccctcctacgcgtgaatcagacaaatgaccataaaaggcaaaccataactcagaagacaggcagactgaaggtaccagcaattttttctagccagttttgaaatacttcatttggggcctgaacagtgaccctgtattgcttgataatttaaaagccttccaaaaaggcagaaaaattgaattagcagtgacagcaggtgaccttgccaccttatctgatggcctgtctttcctgtaaccaccccaaactggctttagagatgtttctttgatggtaaatgacataaatatgaaaagatttgagctcacagttgttctctagcctcctgtttgatgctataaatatccaggaagctttgtctagaaaaacaaccagaatcctgaccatatatcttggcccgttaatatggatttaaatcggcagaggagaagccatttcaaaaaaggtctctacttgcttctgatctgaatggcatttggaacttacccagccaatgcagggaagacaatggaagggaactgctattagtctaggacagggtttctcagcctcacactccgacatttgagctggataatgttgtaggggctgtcctgtgcattaaaggatgtttagccagcatccccagtttctacccactagattccagtagcactccccacctccagttgtaataataaaaaaagtctctagacattgccaaatgtccccggggtcaaaatcagctgttgagaatcaaccactggtctagggcagtggcttattgacaccctatgtgggacaattctattttgtgaggtgcatcttccctatctactcatttaatataactcctcagcacactgcaggccttttggcaccctgcaccctgggtcacagcaataacccattcatttccacatgggccaggtggagaaatgctgattcaaggtgtggtgctttctaggacacgtgatgagaaataactcaggttacctcctgtatgtaagccttgggaagaggcagtccagcagtgacctggaaggaaaagaaacagagtcagaggcatttcctatttaaatctcctagcttaaaatggtgcttttcatgtgttaaaggcaagacgctgcaatgcttgcaggctgtacagtagtataagattatttcctgccctaaggacttagggtatgtgaccaatcacacagcacagaacaaaatcgactgctttgggcagcgtggaagacctctatgacctgaattaaggaggtgagaaggaccggatcgatggcaggagaggtggaaaggggtgtaccaagcaggtgcagtgactcgagtgaaggccatagcagtggggttggaagtcaaggggagtgtggggaaagaggaagcggtcgggcctgcggaagtcaccctgggatgtctgtcgatagagcccgtgatgagccctgccatggtttcatgaactggtccacagtgccaacctagcattggtggagctgaaccgtggtgcagggtcaatacaaacaagagggaaaacaatacagaaggattttctttctcttttgtagagtatatctaaaggatggaggtgtctggtgcctccccgccccgccccccagcccccagtcttgatctatgccgtggctcagccctgttgcatccacagaaatgagcaaatgggtgaaggtgtccatttcatgggccccaccatgggcagtggatagtgattaagaagctctgccctcttccattgcagtgagactatgtgctccaactccagaaggggctgtgtggaggcagagcaagaagcaaggaccttacaggtagcttcccgtcagcaagctaatgagagcaggaggcctactctcttgacagagccatatgtgcaaatgttcccctccatgcacagcattatgggacattatcctgactgtgaggtcaggaggaagcaaggaaaggaggtgtgatggtgtgagggtgagtgaggggtgtaagagagaggaatgttagttgtgactgggaaaaaaaagggagtctatcctgtgctactagcagaaaggagtgtgctgggttgggagtgcctttggcactcagggataactaagactggataggggtgctggggttgttatggcagcattcccagtgtgctccggggacccaatcctttgaaggggtccatgaagtcaaaactatttccataagattctgtaacatcttatggcccttttactctcattatcattctctcattgagcatataatggacttttccaaaggttatgagacatgtgatgtcacaacagatcaagtgctgtcttcaattaagccagacccagagaagatctgaaaaatgtacaatgcctaaattttgctgggaaaagataatgcattttcatgtttacaaagttctttatgtttacatgtaactcagtttt

SEQ ID NO: 96098 - DNA, 83712 bp, Homo sapiens
  misc_feature (1)...(83712): n = A,T,C or G
ctgacggatctcctgaggtcaggagtttgagaccagcctgaccaacatggtgaaaccctgctgtactaaaaatgcaaaaattagctgggcatggtggcacatgcctgtaatcccagctacttgggaggctgaggcaggaggattgattgaacccaggaggcagaggttgcagtgagctgagatcgcaccactgcactccagtctgggcaacagagcaagactccatctcaaaacaaacaaacaaacaaacaaacaaaaaaagcttaaaaattaaattctggtgtaaaagacaggtagcaaacaaaaatataaagaaataaagtcattttagatggtagtaagtgctatgaataaaacaggttaatgagatagtaatggggatgtagatggagaggtaacttttgatagtgtaatcaaagaaggcctttttttggatatagcaacataatattatacattttattaacctgtctttatcatttaaaaatgtataaaagctggtcacgcgtggtgggtgatgcctgtaatcccaacacttttggaggtgggtggatcacctgaggtcaggagtttgagacaagcctcgccaatatggcgaaaccctgtctctactaaacatacaaaaattacctgggcgtggtggcgggcgcctgtattcccagcttactcaggaggctgaggcaggagaatcacttgaacctgagaagcggagcctagatctcaccattgcattccagcctgggtgacaagaacgaaattccatctcaaaaaaaaaagtatgaaagctatcttacatgtctatacatatgtatctgctgttcctttaacaactgcatccatcctgacagaaattttgttttttgctattgaaatcagtgttgtgattaacagttttacacatggtttttttgttttgtttagttttagtttttgtttttttgagatggagtttcgcttttgttgctcaggctggagtgcaatggtgtaatcttggctcactgcaaccttcgtctcctgggtttaagctatcctcctgcctcagcctcccgagtagctgggattacaggggctggccaccacgcccagctaatttttgtatttttagtagagatggggtttcgccatgttagccaggttggtcttgaactcctgacctcagttgatccaccagcctcggccttccaaagtgctgggattacaggcgtgaaccactgcacccagcctatacatctttctttatatgtaaatattactttaagataaattcctaaactgggagaggtggctcacgcctgtaatcccaacgttttggaaggtcaaggtgggaggatggtttgaggccaggagttggagaccagtctgggcaacatagcaagactatctctacaggaaaattttttaattaatcaggggtggtggcatgtgcctatagtcccaactactcagaaggatcactttagcccaggagttcagggttgcagtgagctgattgtgttactgcactccagcctgggtgacagagtaaaatcctgtccaaaaaaaaaaaatcctggaagtggaattacaatgtcaaagaaaatacaaatttaaaattttcgggccaggtatggtggttcacacctgtaccaatcccagcactttgggaggccaaggaaggcagatcacgaggtcaagattgagaccatcctggccaacatggtgaaaccccgtctctactaaaaatacaaaaattagctgggtgtggtggcgcccacctgtagtcccagctacttgggaggctgaggcagaagaattgcttgaacctgggaggcggaggtttcagtgagccgagatcatgccactgcactccagcctggtgacagagcgactcaaaaaaaaaaacatttttttcccgtagatattatcatatcaaattacccctgaaaaaggttgtaaaaacggggcctctgcaaaaagtaaacattttttctagcaactgcctttataagcatttaaataaaaatattttttccttctatttgctgtgaaaggttgattttcattctttatttgaccaatttgcaacacttgacagaattaattacctctttttccatgaaacacattcttcacttgtcttgttttttttttttgtttgtttacttgtttgtttttgagacagagtctcactctgttgctcaggctggagtgcagtggcactatctcggctcactgcaaactctgccccctgagttcaagcagttctcctgcctcagcctccctagtagctgggattacaggcacgcgctaccacacctggctaatttttgtatttttatagagacggaggtttcgccatgtttgtcaggctggtctagaactcctgacctcaagtgatccacccaccttggcctcccaaagtgctgggattacaggcatgagacaccatgccaggcctcctcacttgtcttctaaggtgggatgctcttggggttttccttagaacacactggactctcctttccttttaagagacagggtcttgctctgttgcctaggttggagtgcagtgtgatgattatagcttactgaagtttccaactcctaggctcacaggatcctcccacctcagccttctgagtaactgggactacaggtacatgccaccacgcccagctaactttttaaatttttatttatttatttattttgagatggagtctcgctctgtctcccaggctggagtgcagtggcgtgatctcggctcactgcaacctctgcctcctaggttcaagggattctcctgcctcggcctcccgagtagctgggattacaggtgccagccatcacgcccagctaatttttgtatttttagtagagacggggtttcactgtgttggccaagttggtctcaaactcctgacctcagctgatccacccacctcggcctccaaaatgctcggattacaggcaaattttttaatttttatttttgtagagacagggtcttgctatgttgctaaggctgttctacaaactcctggattcaagtgatcttcctgtatttggtctcccaaagtgctgggattagtaaaggtgtagccacagctcccagctggactctccttttcaatcttccctcttggttcctcctgtctccttgcattctgaacactgaaaggttctaggtgtcagtctttggtcctctctctacctacaatacccttggttggatctcattcaatcccatggatttaaatatcttctctccatttggatgtctaagagaaatctaaaaatgtctaaagccgaattcataatcttaaccccaaaacctagtcctacattttactttatttcaactcagcgaatggcaattccatctttccagttgctcagagcaaatccctgctttctttcttttacattccaagttcctctcttcattaaggtttctgctgaagtcagatgcccaaagaaatctcttaccacatttctgagacaaaactttcccacctcccagcatcactgcctatcctcttagcttgcctatttttaaaatatagcatgtcataatctctaaaattagcctatgtatttctttaacttgatcgttgtctcctccaccagaatatgagctgagagcagaaactttgctggttcactagggtatctctagcatctatagcagtgctgttggcatagtggccactcaataattatttgctccatgaatgaacgatttatgcaactcatacatagataactgtcaaaaaccaggctgttgagatggcaaaggcagtagatttagagaagaaacatcaggtttggggcctataccagccacagctatgcagctttgggtattatccttcaaagtctatccctctgtaaaatgggatttctgccatcttcctcaacaaataagaaagctggaatagtcaatacctatttgatagtataagacaaaagattcactatctgcaatttaccagaaacatttccttcaattttcttcttaatttcacttgtttaggtacaacacaatatgagacaatgtgttttagggttattattataatgacattatattactaagtctgtgcctttaacatatcacttgtgcaaactttaagaatagtaactttaaggccacgcacggtggctcatgcccattatcccagcattttgggaggccaagggagactaatcccttgagatctagaccagtctggtcaacatagtgaaaccccaactctaccaaaaatagaaaaattagccggcgtggtggcatgcacctgtggtccaagctactcggggggctgaggtgggaggatcatttgaacccgggaggcagaggctacaaagagcggagatcatgccactgcactccaccctgagcgacatagcgagactccgtctcaaaaacaaaaaaacatatattagaaataattaccagaaatagaaaatcacaagagattatctaatcccgtatatggggctactataaataacctcagaatttagaaataagaaaaaaatattaaaagccccaaaattaataaaaaatcagttttaggccaggtgcggtggctcacgcctgtaatcccagcactctgggaggccgaggcgggtggatcacgaggtcaggagttcaagaccatcctagccaagatggtgaaaccccgtctctactaaaaatacaaaaattagccgggcgtggtggcgggctaattaggtggtgcctgtaatcccagctactcgggaggctgaggcagagaactgcttgaacccgggaagcggaggttgcagtgagccaaaatcgtgccactgcactccagcctgggcgacagaatgagactccgtctcaaacaaacaaacaaaaaaagttttagatgagctctgccagtagtaaacggcttgtaaaagaaacccggtatctggtcaagtcctaagtgacctgaaccacgcatcttcaggactctactgggatgactgtaacctgaacgcggttcctagagcagagcaagcatattccttggactcagtaacacaaggggccagtcctctccagcatcccagctgccaccgccctgtcaggctccccaggcaattgtccatcttactccttctccagcgtggacgcttaaggggagggagcatccctcctcgagggtcaactggcatgtagcttacgaagaccgcgtgagttctccaaccccagacttgctgcggggcggggacgtgggggtgacaaaatccagactacgaccctccatgagccctggcaaccccggggtgaccccaacaccgatgaggccacgcgcgctccagctctgacactccttccagatcggcggggcctgaaacagcgggctaagcttcacctacggctgagcgtcagattcagctgaggagattctaaaagcgctatgctgggcccagacccaggccctccagagcagaacgcggaggggcccgaccccagtctggtggcgtaggtgtgtgacaaagtatgagggcgcgccaagctctccagttccacatctgctgtcgagtccagcgcctgccacgctcccgtgcggggacccgcccaaaactccctggaagccaggcgattcagaccccgccaccgcgtccccagagactgggcggaaaccggagactcgcctcccgaacccgcgaaactatctcccgcgagactkccccgccccaaccccgccccgcaactctactccctgatkggctggaattacggccggattccggagtcctttccagctccctcttcggccgggtttcccgccgaatacaaaggcgcactgtgaactggctctttctttccgccaatcatttccgccagccattcatcaccgattttcttcatcttcccctccctcttccgtcccgcagtccccgacctgttagctctcggttagttaagggactcgggtccttccgaactgcgcatgcgccaccgcgtctgcagggggagaagcgggcaggggcgcaggcgcagtagtgtgatccccyggccagtccctaagcacgtgggttgggttgtcctgcttggctgcggagggagtggaacctcgatattggtggtgtccatcgtgggcagcggactaataaaggccatggcgccagcagaaatcctgaacgggaaggagatctccgcgtaagcacctgacattgttgttgagtgtggggctgtggacgagggctctgagggtgtgcaggtcccccggacccattttttgcgggagggacacttgtagcggaagagttaggcccataacacctgaagacctgcagccaaagaaagagaacccgggcacaacctgcgtttgcaagtggactgcctagtggctgtagccgctggctcctgtgcttcggggaaaagtcctgtgccgactrtgctcccaaacgcgcagctgctggtgactttctgccgggagagtgggtagttgcggcttcctggagcccccctagtcagaactcagaaatccaatctacttaattcccgttaatttggaggtgagtagatggagactagtgaggtgacaaggcttgacaagactacaaggctgataatgacagagggtccttccagctcatagcttttcccactataccatagtcttatcatacgctaagtgaaatctaatacatttttcctttctcttcaatctcgtgcttctctctaacagccrtctctctgccctggtcctagagttacttgaaacgtaatttggctcctgagtcctgagaatattctgcattccwcttgacctctgcctgttctacccttgcgggacatctgaatgcttaattagtgggtatcgttgccagctttactcccaggaagtaacactggctgctttttgtctgggaggtgactggtgaggaaaaatgagagtagaaggaagagggaaaaatatattccctctagtagatgaaggagggaaagatatattctgtgtgaccttactgagtttgctcttgggacctttcacatcacccgttatgtaagtaactgttgccagccacagcagttactaaattgtaattgtcctgtaactcctaactttgtaataggtttttgagtgaattacaaagtcatcggtggtgaaaagtccgggcccagtggctcatgcctgtaatcccagcactttgggaggccgaggtgggtggatcacctgaggtctggagttcaagaccagcctatccaaaatggtgaaaccccatctctactaaaaatacaaaaaattagccgagtgtggtggcaggcatctgtaatcccagctacttgggaggctgaggcaggagaatcacttgaacctggggggcagaggttgcagtgagctgagatgcgccattgcactccagcctgggcaacaagagcgaaactccgtctaagaaaaaaaaaaaaagaaatcacaatacttactgcttagtgcttttcaacatgtggcttgctaaactgtatttctgctttactttctgtttttgtttgcttgtattcaaacttacttccttttccagtggctttttgttttaatataaaaatcttccttttagaaagactgattgtgaagagataatttagtgcataataatagtgcagataatttagtacaataataatgcatctgggccagtactgagaataggtgctcactgaatatactttcgttaattggagagcaaattaaatatgtttatcaactccataagggcaaatacatgtattgtcttatttttgtctatatcctaaacacctggaaaccctgtttcctgccttactacttgtgtggttttaagcaaattaattaacctttctgtgccaaagtttcctcaaatgttaagtaaaagtaatgtctaggtcattgggatgttagtagaattaaatgggttcctaacagatgatcatttataattcttcctggcacataataagtattcgatatatgttgtattaataatcagtaattagttaatgtatatatgaatgattcattatctttttttttttttacatggtagctgctgccttgagatctatttttttttttgagatgaagtctkgctgtgtccaatcttggctcactgcaacctctgcctcctgcatacaagcaattctctcatatcagcctcctgagtacctgggattacaggtgcccgccatcacgcctagctaatttttttttttgagatggagtttcactcgtcgcccagactggagtacaatggcrtgatctcggctcactgcaacctctgcctcctgggttcaagcgattctcctgcctcagcctcccaagtagctgggattacaggcgtccgccaccatgtccagctagtttgtttgtttgtttgagacagagtttcactcttgttgcccaggctggagtgcaatggcatgatcttggctcactgcaacctccacctcccaggttcaagcgattctcctgcctcagcctcccgagtagctgagactacaggtgtgtgccaccccgtccggctaatttttgtatttttagtagagacgggctttcaccatgttggtcaggctggtctgtaactcctgaccccatgtgatccacccacctcggcctcccaaagtgctgggattacaggcatgagccactgcaccggtcctagaatttcttaaaaatccagcccacttcccacattccatcctgcggattaggaaatcatttgaggccagaaaagtgatgtgatttgtccaagggtgaatggcaatggctcaactaaaactaaggtcttcacccagtatatgatgtttttcattctaaccagcacttactacttgctaaaaggaatttcgtaagcttttctttttcttttctttctttctttctttttatttttcagacaaggtcttgctctgttgctcaggctggagtgcaatggcacgatgttgtctcactgtaacctccacttcctgggttcaaacgattctcctgcctcagcctcccaggtagctgggactacgggcatgcactactatgcccggctaatttttgaatttttagtagagatggggtttcgccatgttggtcaagctggtcttgaactcctgacctcaagtgatctgtccacctccacctcctaaagtgctaggattacaggtgtgagccactgcgcccccgctggcgctttgctttttctttacagtcttcctctcattagcatgtttcccaccctgctgagaatgctatccctgactcgtcctcttctattattattctccttttatgccttcctgggagctcggacatcaacaaagttcagcattccagattccttctctacctgctctactctgtgggaaactgggtacttacatgatggatttagttgccaaattatctttctttggaagtaacagccccttttctccctcacggggaattctaagtttgcagcctgaatttgacaaccgggggaaggtctgagagttagagacaagtatctgttctttgtgggtatttattcacttactcaacaagtagctgtatgtgtcccctaagccaggcaatcttcaaagctctgagagtctaatagtgaacaaaacagcccaaatccctaccctcatgaaacttgcatactgatgggtagagacagacatttaaataggtgaaacacattgtgagctggtgggaagcacaaagagaacaccagagcagaaaagagggacaggagtttctgtggtatggtggctgcaattttaaatatgggagtcatagtctttgtaaaagtgacttacgggcaaagacttgaaggaggtggagccttaagcctgccaatgttgtgagggaaatagctcctgaccaaaaacacagcctgtgccatagacctttgtcctcaccagttactaacttactgctttggggggtcaatggcaatggccctgtgagaagctgaccgagtggaggctcctgagtagaggaacctgaccctgccctgggcagaagggtggtgtcttttaaaagattatgcaaagtgggagaaggatgtgcattagtgttggaagacccaccttgctttgtaggcaagaaagcatagttgttctataagtgggcctttcaaaggggggcttactacatttatatgatttgtttggtttttccttcccttagtttgctataattaagcctgytctctccattggtggcatttttcttgattaagtctcctttctaaagagactggttgtgaagaggcagatggtttgagtaggtgctgcgagtgtttgctggcsaagtgcagggcaagttgggtatatttgtaagctcgctgtggatggtagctccagagcctaagcacggtgctgcctcctctgtgcatcactgggtcatgcaatttacctctgtgccttagcttctgtatattggggtagtaatgtcacctaactcataaggttgttagaattaaatgagtttaatacctataaagcatttagagaagttgttggtacatggtaagttttaataaataggtacttagaaagtactcattgaataaaaaagtgatgtttgtgtttatccaggctgtacctttgggagctggcttataatcttgagacttaaaattagaatttatcctagtgatcaaagataaaagtttggaaccttggctgtacatttagctacagggctagaagaactgtttttgtgaaaataatttgcttaccatagtgaagggcaggtcttcttggttactaagttaacatggataagacttttactttgtcctgtagattaaatacatgtaggcccttttgtgcttaaaaagatttgtctgggcagggcgtggtggctcatgcctgtaatcctaggactttgggaggccsaggcaggaggatcacctgagatcaggagttggagaccagcctgactaacatggtgaaaccccatctctactaaaaatacaaaattagctgggcatggtggcccatgcctgtaatcccagctactccagaggctgagacaggagaatggcttgaacctgggaggaggaggttgcagtgagccagtgagccaagatggcgccattgcactccagcctgggcaacaagagcaaaacttcatctcagaaagaaaaaaaaaaaaaatttgcctgtaatgaactccaaagtgcaggttgctcaaaagttacatggaaacttgactgtcatagctggattgattctggaagcctgtgcaggagaggtcggagttccagagaggctgggaccttcagctaggaccccagccaggctgttgggcaggttgcagcgatagtgcagcagagcccagagctggcagccaactactatggtcatggcacctgattggggatgtggtttgcaaataagtgtctgtccttgtccatcaggggagttgggatcaggcagtttgggatttgggtagtggggttttgagcagaggtctgtggttccctgttacatcccctatttgcatgaagaatcttctagaaggaaagctggcctagtacagaggagggtccttggagtggaagcaaatggctcccttctcctctaattgactcagtagaggttggtagaatagaggttaaggggcagggatgcttgtgtggccttggaaaagttagcttcactttcctttctgtgcagtagggatgatgagaactgtctacttcctgacgttgccccaaggattaaaagaatgtaagactctcaaaacaagcttctttgacgtcccatccacagtgcagaaggcccccattacccctgcactgtgcggttggctctcctttgcaccccttaattgaccaaaaagcagcttctgtcaccctgtaaatccttgaccttgaagaagtgggtggctaaaggtgccacagtcaagattcctcagccactcggctactacccttaccctcaattttgcagtttatgacactttagccagaagctaagtgacttgcccaggtgttccaaggtaggtggcagaggctcgatggtgcatttctttccctaccatgggcttgtcattggcttgctagaaggaattgcaaacttctaccctccagcaggagacaccctgggtttggttctccctgaggcctttccattgtgaggaaatcattccacccatcagtctggttgggaagcacccaaacagattctcttcaaaaagtcatttttgaagttatagtccaattttgactggttagagacaggtcagacctacttactttgctggctaagctttttttttttctttgcccctcaccacaagcctggacgggagacgtactgcttggtatctggtgcttgagaggtcccaggagataagggagcatttctgtgaaaggttttgccagagcctgtcargaacttaatcttgactgcaatgaatgacttaacattataagtgatctttgggtttaggtgcccaaataccagtccctccttartaagcagccttttagacctaaccttttctacctaaggttttgttcagtctttttgaaaagcaggaaggccaggtccttgtgaggcttttctcattacaagctcttggcaggttcttccctccaagtggagaacccttaccttccccattctttctaccttcccctctgatgatccagagggctgcaagggacctagagctgttcattggagccctagtcagctctagcggccagatctatggttaggtaatcctccaatagtgagactaattctcagtgttagaattaggggtctgcctgttctcaccagcagacccactggcatcaactctcctttgttgacatatagttaagcaccgcttcttacagatcctcatactcagagccaaccttgtcttgtctcataactcttgctactggcagaaggtgataaaattgtggcctagaggccaaatgttttttgtttggcttacagaattagattacttctcaacacatttattactttacaacattagattacttcttaacacacttatgcctgtagttacacataaaaatctggatgcttgactttttgaaagatgtgaacagtttagcaatactgtactgtctatcttcatgccatcaatttgttggatctgagtagatgctgcctaccccctcatccttgagtgggtgggggtgggggaggtgggacctcattgttcaggaatcctaccacacttggttgcctgtaccaggactccgaaggttctttcctctttgagacctttttctgaatgaacttatggtccacttttaaaatcctaaattttataaagccttaaccagtccaacctagtccgtttattgcattagatcagaggttgtcaaatggggcagttttttcctccctctacctcagggcattgggcatgcctggagtcttttgggttgtcatatggggaaggggtatgctattggcatctagcagtagaggccaggactggtgccgagcatcctgcagtgcacaggatagtccccataacaaaggatgatctggtccaaatgtcagtggtgctgagatcgaaaaaccctgatcragaagcttaatgtgagttattgtgtcattgtgtgtgtggattaatgatggactttaccctcactaagaattataggattcattaaaattttacactattctgacttattttcatgtcataaatatcaagcagtttacctttgctttcttagggctttgagttagagacaattggatggaagaactttacattataaactttcaatgaagcataaaatagcttcctcacattaagctttcaaatacgtatttgaggtaactgtcaaatttggtaaatgtctgggttaaattataataatttttttagtaaatattcttatgtaataatagtactattatcagttgactgtcttgtatactgatatagcttttgctatattagtgataggtgaaaatcagttttctttcaacaagaaggtaatttagtgttttaatttgacttaaatgactagcaatttgaaatatatgtatttcttggaacactaggtggccttacaatcacaattatttttacaaggaactacatattaagtttttaaaaattttttgaaggttttttttttttttttttgagatggagtttcactcttgttgcctaggctggagtgcaatggcgcgatctcggttcaccgcaacctctgcctcccgggttcaagcgattcccgtgcctcagcctcccgagtagctgggattacaggcatgcgccaccgctcccagttaatttttttttttttttttttgtatttttagtagagacggggtttcaccgctcaggctgtgtcaaaccccccagctcaggtgatccacccacctcagcctcccaaagtgctgggattataggcgtgagccaccgtgcccagccgaagtattttttagtagtataaaaattgttaatgaacaaatgaaataaatcaacaaatgaacaaaatgggaataaaacatattaaataaaacatttgtgttctgcattttaaaaatcttataatagctgggcgccgtggctcactcctgtaatcccagcactttgggaggccgaggagggcagatcacgaggtcaggagatcgagaccatcttggctaacacggtgaaaccccgtctctactaaaaaatacaaaaaattagctgggcgtggtggcgggcgcctgtagtcccagctacttgggaggctgaggcaggagaatggcttgaacccgggaggcggagcttgcagtgagccgagatcgcgccactgcactccagcctgggagacggagggagactgcgtctcaaaaaaaaaaaaaaaaaaaaaaaaaaaaaaaaaaatatatatatatatatatatatatatatatatatatatatatatatatatataaaacagtaatctattggggcaggggataaattgtgtccttgtttagaagaagactttttttttttttaaaaaaagccctgttgtttttgttgttgttatttgtttgtttgtttgttttgagacggagtctcagtgggtcgcccaggctggagtgcagtggcgcgatctctgctcaccgcaacctccgcctcccgggttcaagcgattctcctgcctcagcctcctgagtagctgagactacaggcgcgtgccaccacgcctggctgatttttcgtattttttagtggagacggggtttcaccatattggccaggctggtctcgaactcctgacctcgtgatctgcctgccttggcctcccaaagtgctgggattgcaggcgtgagccatcatgcccggcccgaagccctgtattttgaaggtgaatgtttttgcttcttctctgatcagttactaaaagtgttttccctgtgccatttgagaattatttgagaactactctaagcttatggcacatttcagcatttttgttgtctaaaggcagctttattttaatcatgtaaatttcatgctgcctcctttgcctaccatatagcttctgttgaaatgtccatgttatattttattttatttactcatttttctatatccataataagagttaaaggttatattttagcaatgtgtttttttctctgtcataacatgttaaatattttaaattcagccatgatgttaaacagagtgaattggaatttctaacggatttcggcaggaatgattatataagacttagggccaaagagagcctgggtgactgtgtaggggtattaggctatgcccagcaccacatctggttgtcattcaggggagcagctagggctggaactgctggggagtgcaaactgcagtattccctgttcccttgtctcagagcagaattgtggcctctatccaggtccaatcccagttaaaaaaaaaattccaatggtctattcttcttttgagctatattattgtagagaatactgacttgaaaaaacaaagtcactaactagaaataaaatttgagctgggtgcagtggcttataactgtaatcccagcacttttgggaggccaaggtgggaggatcacttgagctcaggagttcaagatcagcctgggcaacatggcaaaatcccatctctacaaaaaatacaaaaattagctgaagtgtggtggtgtgcacctgtagttccagctacttgggaggctgaagtgggaggatggcttgagcccaggaggtggaggttgcagtgagctgtgattgcatcactgcactccagcctgggtgatagagccagaccctgtctcaaaaaataaaataaataaataaaaatcaaaataaataaaatttgaaaatcttgggtatgacttctttcttgtaccattcaacattcttgatgtttactaggccagtccaaataatctatttcttgtgtgcctgtttatgtcagttttttgtgacgtgtggagaagtggaactgggagtaaccaaatcagaatgaaggaagagctgtttgtgaatgtccatatgacaaatgacaaaactggttttccaagagggacagagcatgttcaagttgaacattgtatcatatatcataactgggcaaggttgagctattcagatatgtatttatggatgtaatttcatttacttgacatcctagtgtattgttgagaagttgtatgttggtaaattgatcatcttagttttgcaagaggttatactttctttcactctaataaggagactgcaggaggttatacttttagccttgtgttaaattctttgtaaagaaaattcttttgtgaattagaatataatttgtaagtttatactgaatttggagtgggattcattgatttatcattcaaccttatgtggatacgctgtggtcatcttactagtgcaggttgagcaaaaggtgtgtgcttgagtttgttcctgtaaaatttttcatgacagcacctggagagtggaaatgtgaaaaaagatgagcatcagcactttctagaagtgttggtctaagttttcatttatttactatatgattttgaatgccatcaactaatacattttcaattatccctgaaccctgtggctcagttagtgtcagtgggagtaagaaaagatccacgtgtccgggaacagtggctcacgcctgtaatcccagcactttgggaggttgagatgggtggatcacgaagtcaggagttcgagaccagcctgaccaacatggtgaaaccccatctctactaaaaatacaaaaattagccgggcgtggtggcacgtgcctgtaatctcagctactcaggagactgaggcagcagaatcgcttgaacccaggaggtggaggttgcagtgagcagatatcgcaccattgcactccagcctgggcaaaagcgagtccccatctcaaaaaaaaaaaaaaaaaaagaaaaaagaaaaagattcacatctacttgaggcctggaaaattgttgggaagttcctgtacatattaaaccagataatgtccattcagtggtgtttttattttattttattttattttggagacagtcttgctctatcgtccaggctggagtgcaatggcaccatcatagctcactgcagcctcaacctcctgggctccagccatcctcctgccgcagcctcctgagtagctgggactacaggggcctgccaccactcccaactaattttttattctttgtagagatggggtctcactatgttgcccaggatagtcttaaactcctgttctaaagcaatcctcttgccttaggttcccaaagtactgagattacaggcatgaaccattgcctgctcctggccagtgtttttgatttaaaagagaaatacaggccgggtgcagtggctcacgcctgtaatcccagcactttgggaagctgaggtggggggatcacctgaggtcgggagttcgagaccagcctgaccaacatagagaatctccacgtttactagaaatacaaaattagccaggcttggtggcgcatgcctgtaatcctagctactcgggaggctgaggcaggagaatcgattgaacctgggaggtggaggttgtggtaagctgagatcgcaccattgcactccagcctgggcaatgagagcaaaacttggtctcaaaaaaaaagagaaatacaggccgggtgcagtggctcacgcctgtaatcccagcactttgggaggccgaggtcctagatcgcttgagcccaggaattcaagaccagcttgggcaatggtgaaacccatctctaccaaaagtacaaaaattagccaggtgtggtggcacagacctgtaaagtcccagctactcaggaggctggggcgaaaggatcgcttgagcccaggaggtcgaggctgcagtgagctttgattgtgccactgtactcccagcctgggtgacagagcgagaccctgtgttaataaacaaacaaacaaataaaagagaaatacatctaataatctgcatcacttatttgtgcttgaaacattcagtgttaaccccaccctttcctttttctctaggcaaataagggcgagactgaaaaatcaagtcactcagttgaaggagcaagtacctggtttcacaccacgcctggcaatattacaggtattatgatagtgtattttcattaatgttgtctttgcttgatttctcagtatcatttcagacctctccctctactttcctcctttttttttggctgttgtgtaatctcatgccttttcagtctctcttggcaggctcccccctttggctcagcttctaaatgttggcatatcctggccctctgctcttctctgtggataccctttctctaggccagtgtctcttaacctttggtcttagtagggcccctttacaatcttttttttctttaatttaatgtatttatttatttatttacttttgagagacaaggtcttactctgttgccaggctggaatgtagtagtgcaatcatagctcactgtagcgttgaactcctggcttcaagcagtcctcctgcctctgcctgccaaagcatgggtatyacaggcgtgagccactgtacctggccccgtttacactcttaaagatgtaagacctcaagaagctattgtttatacagatttatccattaatgtttactatattagaaattaggaagttttggccggacacggtggctcctgcctgtaatccagcactttgggaggccgaggtgggcagatcacctgaggtcaggagtttgagaccagcctggccaacatggtgaaaccccatctttattaaaaacacaaaaattagctgggcgtggtggtgggcgcctgtaatcccagctactctggaggctgaggcaggagaatcacttgaacccgggaggtggaggttgcagtgagccaagattgtgccactgcactccagcctgggcgacagagagattccgtctcaaaaaaaaaaaaaagagaaattaggaagttttaaaaatgtttattcatttaaaaatgccaatagtgagctcatttattatatgttaacataaataacattttatggaacaaaaacttttttaaaaagaaaatttagtgaaaagaggggcattattttatatttgtgcacacctctttcctgtatggcttagtagaagagagctggagtcctatctgcctctgcattcagtcttttgctgtgtgctggtttgattgaaatatatggagaaaatttggcttcatacagatgtgtagctataaaagggaagaatttttttaacagtccttccaggtaattgtgggtatttttctttgatgttgtaccaggactcagtaagtaaattttaaaagattagttgcaatgtagaatctgaaactctatcagtgaactttgatactttgttacatcttctcagacttgcacactttgttacatcaaaatgttacatttggaatgaatatttaccccatgcatggttttgtaacatcctttgttcctcatttggaaaataatagttcccggaattatgcagatcttccaaatgttaacatttcattatgcaatatgaaagaattggaatcattaacatcaccaacaagctcatcagagaagttttcaagtattgagaagctgtcaagctcacaggggtggataaaaaattttaattttcacccaaaaactcayattttatcattrgcaacaaatacaattaattgtttcccttgaaataccagtttcactttattcatttttgagaaaatatttgtcaaatactcaagcctgaataatcattgcttgtcagttgttatttcaagtaggtgtttcatataaaaatgcatctgtttcagctaacaaggcaaaaaagcacaagtgcagcctggacaacaaagtgagatcccatctccacaaaaaaattaaaaaatgagccaggagtggtcgtatagaggtgtggtcccaactacatgagagggagacaggagatcacttgagcccaggaagtcgaggctgcagggagttgtgttcatgccactgtactccagcttaggtgacagtgagatcctgtctcaaaaaaaaaataaaaataaaaataaaaaagcactaatgctttagtaacaaccacaaccactgtacttctgtatatagcagaagtgcattatgagtgcttcccaattccttacatagactattaaaaacacatgcactcaagagttgaggtttatttatatatatatattttttacttttttgggacagagttttactgttactcagtgcagtggcacaatcttggttcactgcaaccttcatctcccaggctcaagtgatcctcccactcagcctccagagtagctgggattacaggcatgcgccaccatgcctaatttttttttttgagacggagtcttgctctgtcgcccaggctggagtgcagtggtgcaatcttggcttactgcagcctccgctcccagattcatgcaattctcctgccttggcctcctgagtagctgggattacaggcacctgccattgcaccctgctaattttttttttttgaaacagaatctcgctctatcccccaggctggaatgtaatgacataatctcagctcactgcaacctttgcctcctgggttcaagtgattctcatgcctcagcctctggagtagctgggattacaggtgccacgcccagctaatttttgtaattttagtagagatagggtttcaccattttggccaggctggtctcgaactcttgacctcaggtgatccacctgcctcagcttcccaaagtgctgagattacaggtgtaagccactgcgcccagccttaattttttgtatttttttgtagagttttttttttgccttgttgccctagctggtcttgaactctgggacccaaagtgatcctcccattttagcctcccaaagtgctgggattacaggcatgagctactgcgcttggccttaattttttgtatttttttgtagagacggttttttgccttgttgcccaggctagtctccaactcctgggctcaaagtgatcctcccgccttggcctcccaaagtcctgagattacaggcatgagccactgtgctcggccaagttgaagtttaagaaaattaataatgtatatttcttcatcaagggtggtcctagtgaaactggcatttagttttactgggagtgtgtggtagtgaaggataccttgactactartccaaagccattgtcttgatttgtgctggttcactagtagtcttacacaccattgcttttgcaccatcggtacagacgttaacacaatgaaaaaggcaaacaacattgtagtggtattattatgaagctagtctggccctcataaatctttgaaaaggtcttggggtccctcaagagtgtgtgggccacattatcagaaccattattttaggcagtttcatctatcaggccagtgacttctaaatctagatttcttctgagctccaggctcttggtctgggacaccactggtttccttcccaccttcaagtctcctttgcttgttgttgytcatcaccctaatacctaaaccatttgaatgccttgggctcacccttgagatctcttccccatcttattctttccctaagtaacctcacccagtcccatagcttcatgagggaatgcttccaaatttaggtctctatccagtatttcttccctgagctccagattcacccagtagggagatattcaatacatatttttacggacaaatgtatgaaggaatgtttgcaatcttgatttggatgacaggaaactcacggctttcatttgaaactcccatcagagtttcacccaagttggacatagtctccttctcaatctctttatttgtatgtctccaatagatcatttaatcccttgctaaatttctatcccttgttcatcaagaatgtcaaggtgggcatggtgcggtggctcatgcctataatcccagcactttgggaggctaaggcgggtagatcacttaaggtcaggagtttgagactagcctggccaacatggtgagaactcatctctactcaaaatacaaaaattagccaggtgtggtggtgcacacctgtgatcacagctactcaggaggctgaggcaggagaatcgcttgaacctgggggacagaggttgcagtgagctgagattgtgccactgcactccagcctaagactccgtctcaatttaaaaaaaaaaaagtcaaagtgaatagtacttaaatattcccctctcctcctctgctgtttgtctaagagggcttagctgagaagaaaagcacagaaggcctgtcactctctgcctggcatgttctctgctgtggtggattttcccttttttgcaaattactaagaatcaaaagtatatattgtgggtgtatactggtacatttggtggctggttatttcttggcttatttttgcaaattgtttgttgtagaaagagtaaatgtcataggcaagaagtataccctttttaaagcaacattgggggtgttttttttcctccattttaaaaactgacttccaaccttgttttttaaatttattgattacaaatgtttttattacataaacactgttctacagctcgtctcctacgtccttgctgataaaacagtggtagaatcttttaattttgtactttagcaccagagtcaacagctttctgtgatacaaggtttatataatatgttgtaatcacatctccctgcctcagacctctagtctttttcgctstggtgctggcaccaccatcttcccacattccctgagctagaagcctgaggccgtctccttaggagctctcttcctcactccctgcatccagttaggggctattgtcctattgattgtgcctctcatcaactcttggaatctgttgcctccccttgattcctatttctcccaaccctggggccactatagttacctgcttaatgatttggggttctatctatatacctcctgtctgtcctcctgactgcaattgcaatccttgttaaaatgcaagtctgatcacaatctatccagccacactcactctccatcctttaccagaatgatagtacaagttgagtatcccttatccgaaatgcttgggacaagagtgttttagatgttggaatctgtatatacatagggatgagatccaattctaaagcaaaatttatttgtgtttcattatataccttatacttgtagactgaaggtaattttatatatatrtgtgtgtgtgtatatatatatataataataattattattattattwttttttttgagactgagttttgctcttgtcacccaggctggagtgcaatggcacgatctcggcgcactgcaacctccacctcctgggttcaagtgattctcctgcctcagcctcctgagtagctgggattacaggtgtgttccaccacgcctggctaatttttgtatttttagttgagatgagatttcaccatgttggtcaggctggtcttgaactcctgacctcaggtgatccgcctgcctcggcctctcaaagtgctaggattacggacatgagccactgctcccggccaattttatatatttttaataatattttgcatgaaatgcacttttaactgtgttttgactgtaagccatcacatgaggccaggtgtggaattttctacttttggcgttgtcagtgctcaaagtttctgattttggagcattttttatttgtggttttttttttttttttttttgagacagggtctcactctgttgtccaggctggagtgcaggggtgtgatcacagttcattgcagcctggatctcccaggctcaagctatcctcccatctcagcctcctgagtagctgggactacaggcatccagctaattttagtatttgagacagaatttctccatattgcccaggctagtctcagactgagctcaagtgatccacctgccttggcctcccaaagtgccgagtcaccgcacctgactgattttggatttttgagttagggatcttcaacctgtactacttatatagagtgtctacaataattcaaattgtttgtttatatttctaatcgttctatgttttatactaccctacgatgtaggagatgtccccttatagccatagtaactcatgctcaaagatcttgggtagcttgcccaaagccagtcaggaagggactgagtctgggaaatgaacccagatctgtctctaaaacccatttgttcttcccctttgttttcctaattccttagcaatgcattcaagaacattcatgatctggcccaagtatatatttaaaagttgagttttcatytttttttaataaagtggatgagtaacttcccaaataactgaatatttataggaaattaagacttgacttttcattataagagatactaatgggctaggcatggtggctcacgcctgtaatcccaccactttaggaggccaaggcgagtggattgcttgagcccaggagttcaagaccagcctgggcaatatagagagactttgtctccaaaaaaatacaaaaattagctggttgtggtggtgcttgcctgtagtccccactactgaggaggctgagctgggaggattgctcacgcctgggaggttgaggctgcagtgagctgtaatcgtgtcattgcactccagcctgggtgacagagcaagactttgtctcaaaaaaaaaaaaaagtttctggtaaggtgatagaaatacagcctcagccccatagcctcattagtatctctcactctctctcttttttttttttttttgagtcagaatcttgttctgtcatgcaggctggagtgcagtgatgtgatctctgctcactgaaacctctgccctcccctgtcccccaggggatcctcccaccttagcctcccaaatgagctgggactacaggcacaccaccatgcccagataatttttgtattttttgtagagatggggtttcgatatgttgcccaggctggtctttaactcctgggctcaagcaatccacacaccttgacctcccaaagtgctgggagtataggcatgagccactgcacctggccaaaaaactgatttttaacagtattcgggaactattcagagtgctttatgtatagtaactcattcagtcctcacaaaatacatggacagaatacagttaataaactcaactagcctgtatcttcataaggttttctgaaacagaaagaaaaatgaaccagtagaccaatacccaagatatcttacggtgtagaacacagattagtaaactgtggcccgtatccaaatgctgcccagtttataaagagttaaaaaagcaatagcagcagctgctgtgacacggtatgtgtcccacaaagcctaaaatatacaccgtctgcccctctacagaaagtttgcagactcctggtataaaaaaaaagtgtccctaacctgttctggaataggatcttttttggatgatgtagtactcagccaccttcaaggagaaatcagcattcttttttttttttttttttttgagatggagtttcactcttgtcgcccaggctggagtgcaatggcacgatcttggctcactgcaacttctgcccccggggttcaagggattctcctgcctcagcttcccaagtagctgggattacaggtgcacaccatcatgactggctaatatttgtatttttagtatagatggggtttcaccatcttggccaggctagtctcgaactcctgaccttaggtgatctgcccgccttagcctcccaaagtgctgggattacaggcgtgagccaccatgcccggccagaatacacgttctttaaacattctttttgcatctagtctatcaatggttctataaccactttcccctataaaatgcctatactggccaagtgtggtggctcacacctacctagcactttggcaggctgaggcaggaggattgcttaagcccaggtgtttgagaccagcctgggcaatagagaaactccatttctacaaaaaatacaaaaattggctgtttgtggcagcgtgtactggtagtcctagcttcttgggaagctgaggtgggaggattgcttgagcctaggagttgcaggctgcagtgagccatgatcatgctactgtactctaggctgggtggcagagtaagaccctgtctcaaaaataataaataaataaataaaacctatactaagagtgactctttgaattggcttttagatgtcttttccaataaaactttgacatacgctcataactataactattaagttttctttctggaactggttgtagttttagtgttttagacaaactccttcagaaatattcaggccgaaaatagttacatgtaaaggaacaacaacagcgagagacttcagacttctcctgtgtgacattagatgccaaagacaacatctccgaaggaaaatgctgtcactccaaatcaggcaaggccagtcaagtgcaagggacagcagaaaaatattttcagttatacagacttagaaacatgtccacctacctttcctggaaaactgacttataagttacatttcacttacttgaaacatgaatgaagataaattctagaacagagaagttgtggcttccttactggcagcaagtgataaaacaatttaatctcagagttaagactaaataactagtggtaggtataaatatgaatgaaattgtaaaaaaataatacttttgtatttagaaccacctcctttcctactttgatctaaaaattccggaatgtatcaaatctggtaactgaaccagtgagggttgggtggtggggcaaagaacatacatagaaagtgacatgagaggcacgaaaagtctagggaagcccctacgagaagcatctaatgtacttagatacaaataacccattaaaaaaaaaggtagaattcccctcaaaggactcttctggctcttgcaattcaaattagcaccacaaaactgagaactgtctgtataagggacaactgaagctaagattcaggccatgtcctgakatctgaggagagcgtccagtaatagcaccaatatgacaagctcagaaaatcctgtgttacaaaagccggcttctttctctgccatggtcctgttaaaaggagctgtgcttcagttgtctttgatatgaagggaccaccacctttccctctgtgataccctctgcaattctgggagaaacacaacttatggtagcatgtatcaaccttgagaaggagaaataccaaccactggagcatgaaacaatattagtacaataaaattttacaaataaatggttataatgataaactataaatatgttcatggtcaaagaaacagagggaacatagtgagacactgcatggtggttcaaaggatttagcctctgcactacaagtttctccctgtctctctcttttttttttaagagacaaggtctctctctgttgcccaggctgcccaggcatagtaccatgactcactgtgcactggtgcaatcatggaaaaactcttgacctcaagtaatcctcccaccttggcctcctgagtgctgggactacaggcaggcaccactatgcctggctaattttttgtaaagatgggggggtgtctcactatgttgcccaggctggtctcgaactcctgggctcaaacgatcctcctcccttggcctcccaaagtgcagggattatagacctgagttgctgcacccggcctcctctctgtgttggggccagcagattgccctttgtcttgcctggctgtttattctgtgtaaactagagggaggtccttccaccctcctttctattgtctgtgtggcggggccagggagctttccattgcccctgcgggtgggggagagggtgtggaatgtgccctctgggtgctcctgcctctcaggcatttttcttgcctgatgacagtttctcagccctccatactctgtttttctggtatggcagcagaaatcccacatgtttctagtaggcctgcagcatccttgcttagtttccagtgcagatgcagatatcctctactttctgtttggggtttggcagtgggaaccaggtgggccttgtttaggggaggggctgtaacaccatctgtgttcacataatccctcctgcccccacagcctccctatactcctgtaaaagttctctgcaacaagagtcgcatgattaaacatttcttttattaaaactaaaattgtagaagcttttctgtgcactttgcctttccctaatcatctgatttgcatgcatttattattctaggttggcaacagagatgattccaatctttatataaatgtgaagctgaaggctgctgaagaggtaacgccagaagagctgtgccatcaccctccccaacctccacctgggtcctatcgattaccccttgccctttttggtcctccctgtgaaaacttttatcacccacaggagacattagtttatctattttgtaagtcagaaatgggtgggttagatctgtggcctctggtttgcccgtgagtttttgttttctcattaatgattttcttcccaaagagcaggatgtcaattgaggaaagtgacaagtctcgatcattttaggagatttatttgccaaaattaaggacacacctgggagacaggtctatacctttctccgaagatgatttcgagttctccaaatttaaagaggaaagggtgggttattgaaaagtacacgttttcatgtaagaggtggrtagggaaaaatagtcattcatgaccttctctggctcagtgaatctgcattttttacataagatgacagatggccggacgcggtggctcacgccagtaatcccagcactttgggaggccgaggcgggcggatcacctgaggtcgggagttttagaccagcctaagaaacatggagaaaccccatctctactaaaaatacaaaaaattagccgggtgtggtggcgcatgcctgtaatcccagctactcgggaggctgaggcaggagaatcgcttgaacctgggaggcggaggttgtggtgagccaagatagtgccattgcactccagcctgggcaataagagtgaagctccaaccagaaaaaaaaaagacgatatagacaagtggggcagaggaaaaatgcaggcaatctgcattttacataagataacatagacagaattgggcaggggaaaaatcagatatacatttgtgtctggtgggctggggggatttacatygccatggtgaaattttaacagaaacatcataaagatgttgcagctcactacgaatttctttgtgggcaaaatatgggggaggcatgtagcttttcatcttgtaacatcttatttaggaaccaaaaagggggaggcagatttgcatgacccagttcccagcttggcttttccctttgacttaatgaatttggggtcccaagatttaatttcctttctcaagaaatagcaagcatgacattgctgaagtgcagtggtggcaattaacaagtgaatgatgaatgggttgaagtgagggactcattcttcagaacatataagggtgaaatgatgaccaacacctccttgcttgttagtcatgtctgtaaaagaaatggttcaatatctcaagttgtcttgccatttacctgcttttaatgtctgttttgcagattgggatcaaagccactcacattaagttaccaagaacaaccacagaatctgaggtgagcttttatgagttgattgtgaagagggaaggtgaagtggtttcctctctggttttggtttacgggggctttggggactgacacatttagccaagacctccaggtatttttttttttttttttttttgagacacagttttgctcatgtcacccaggctggagagcaatgatgcgatctcgactcyctgcaacctccgcctcccaggttcaagcaattctcctgcctcagcctcccgagtagctgggattacaggygcccaccgcctcacctggctaatttttatatttttaatagagacgcggtttcaccacgttggccaggctggtcttgaactcctgacctgaggtgatttacccgccttggcctcccaaagtgctgggattacaggcgtgagccaccacgcctggcacctccaggtattctttcttcacagactcccacagaggagatggtgcagggatgaacatttggtactcaaagtgtgactgcagtactgtttgcttccaaatcatctgttgtgtttgttaaaactgatccttggagccaggcacggtggctcatgcctgtaatcccagcattttgggaggccgaggtgggcagatcacctgaggtcgggagttcgagaccagcctggccaacatggagaaaccctgtctctactaaaaaatacaaaatttgccaggcgtggtggcgcatgcctgtaatcccagctacttggaaggttgaggcaggagaatcacttgaacccgggaggcggaggttgcagtgagccaagatcgtaccattgcactccaacctgggaaaaaagagcaaaactccgtctcaaaaaaataggtaaaaccgatccttggcctgtaattatctgcattctaaaaaccaaatatgtattccttttatatgaggttcaggactaggcagaacaaatcagcggtgattaaagtcagaactgtggttgcctgtaggtgggagattaatgctaaactgtaggaggataaagcaactttcttgaggttatggcaatgttccatatatgcgctgtccagtatgggagccactagccccatgaggctatttgaatttagttaaaatgaaataaaattaaaaattcacttccttggttgtactagccactttgcaaggattaagtagctgctattgtattgtaaggtgcaaattatagaaaatttctgccatcgcagaaaagatgattggacattgctgctctacatcttgatttggatgattgtaacatgggtattattgctgtaataagttattagagttcttagctctttttattttattgtattgtatttttagagacagggtctcactcttttgcctcagctgcagcacagtggtgtgatcatagctcattgtagcctcaacctcctaagctcaagtgatcctcccacctcagcctcttgagcagctgggactataggcatgagccaccatgcccagctaattttattttatttttgaggcagagttttactcttgtcgcccaggctagagtgcagtggtgcaatattggctyactgcaacctccacctcccaggttcaagcgattctcatgcctcagcctcctgagtagctgtgactacaggcatgcgccaccacgcccagctaatttttgtatttttarttgcccatattgcccaggctggtctcaaactactgacctcaagtgatctgcccactcaagcctcccaaagtgctgggattacaggcgtgagccaccgcacctgtccccgctttttttttttttttttttgagacagagtcttgctctgttgcccaggctggatgcagtggcatgatctcagctcactgcagcctcygcttcctgggttcaagcgattctcatgcctcagcctcctgagaggctgagattacaggcatgcgccactatgcccggcttattttttatatttttgtagagacagggtttcaccatgttggccaggctggtttcaaactcctggcttcaagtgatccagtagctgctattgtattgtaaggtgcaaattatagaaaataattttctatattttgggaggcctgccttggcttcccaaagtgctgggatgacaggtgtgagccaccacacccagccctaattttttttttttttttttgaggtggagtttcactattgttgcccaggctggagtgcaatggcacaatctcaactcacygctggagtgcagtggcactatctcagcgsactgcaacctccacctcccaggttcaagcaattctcctgcctcagcctcccgagtagctaggattacaggcatgtgccaccacacctggctaattttgtatttttagtagagacagggtttcactatgttggcccagctggtctcaaactcccaacctcaggtgatccacccacctcagcctcccaaagtgctggaattacagtcgtgaaccaccgcacccagcccctggccctaatttttaaaaagtttttgtagatatcacatttcactgtgttgtccaggctggtcttgaactcctgggttcaagtaatcctcctgacttggcctcccaaagtgctgggattacaggcatgagacacctcgcccagcctcttagctcttttatttgatggacttcttaccagacacctaggggatgcattctatgttaaagtacaggtgctctcaggattcaaggggaaggtacattctgaaaggactataattaaagtgttggggggaaatagggcaacctaatttttgccttagaaagtgtttcttcctaccttttgatttctgtgtgatatacaaattatatatggtattacttttaggtgatgaagtacattacatctttgaatgaagactctactgtacatgggttcttagtgcagctacctttagattcagagaattccattaacactgaagaagtgatcaatgctattgcacccgagaaggatgtggatgggtaagtgtggcttggcttcctatgtctcattgcatgctttcatttataatatgtttctatttggggaatacagcataaatgtttctaaagagtaaagacatctaattgcctttatttccttcttatttccatcacttttttaagattgactagcatcaatgctgggaracttgctagaggtgacctcaatgactgtttcattccttgtacgcctaagggatgcttggaactcatcaaagagacaggtaaaaacaacaaaccaaacaacaagaaagcaccatttcctgaatcctggtcttgacatgtggtggcatagaggaggtacattgtgggccataaataaatggacttgattggcagaagggcctgtctactaaggatgttacctaaattttctctcaattttctcagcaactctgtgaagtaggtactgttattgttcaactgctaagaaaataggctcaggccaggcacagcggctcatgcctgttatcccagcactttgggaggctgaagcgggctgagatcacctgaggtcaggaattcgagaccagcctggtcaacatggtgaaaccctgtctctactaaaaatacaaaaaaattatccaggcagggtggcatgcacctgtattcccagctattcgggaggcagaggtgggaggattgattgaacctgggaggcggaggttgcagtgagccgagatcacctgactgcactccagcctgggcaacagagcgagactctgtctctaaaacaaacaaacaaacaaacaaacaaacaaaaccagctcagagagagcaagtaacttgtctgggagacaacggaaccaagatttgaattcagagttatctgagttcaaagcaatttattttaacctatacagtaataaaaatttggatagtttaaaaggatatgaagtgaaaagccccacctccccccacccccaaaatgggcactgaatctccacagtagttccaggactcgacagatggctggaaatgggtctcctgcacagttggccatattgtcccgttactagttagcaccttgctattttaatttcattatgaatacttttagcagaggttattttttacaaggaaatgggtcctggtaaaaagaagtaggtcagaagtttcaagtggaaagttttggccagcataaatgaaaattttctgtggttggcaagaaaaggtcaaaggtcaagctttgacagttcatttctacagttaaatgtatattcttcagcatatttagcaaacattgtagtgccttgcttaaaagaaaaaaatcccacgaggacagcacctgaaggcctcccactgcctcttattgagtgatgctaccatttgccctgatgcagctttaactcttctgctgaatcctaaaaagtatagaaagttaccttttaaaactttgaggtctttacttctagatgttcatgatgttcacattattataagagtttatctttttctgaaaaaaaatgattttatgcgagaagcacaatttaaacccttgctgctttgagcaagggtccactgccctcagccttgactgccctgaggactctgatgaagtcgtcaacttctctctgctttcttctttgtggacagctcattttcgggctccactttgtggccacaaacacctacagcctggttccatcctcatgcctaacagtcatgggattggatcttatcagctgagggaagaaatatggtcccctgtccactactgggtactcactcaggctgtctttagtagagtatgagtcagccctgaaaaggacattggtatattgccagaaaaatggatgctgtgatagcaaaaagaaagctttgctgccacagttcaatttcccctttatcacttccctgcaagtaaccctatggctcaggccctaagccaaaagagaaatttgggtgaggaactgtataaacaaacttaccaaagttagaaggaattaccgatactaatctaatttcttacacatctctccagcctgttacatacaccctatttgttttaactttttttccccatgtaatttaatctgatgtcttcttccgtatggctgattagctgtatgtcagggtttcttttttctttgagtgtaggttttcttcccactcccctatgactcaatgaatgatcttggcttaagctgctcccaaaaacccacggccagaaggacacaagtacaagtcccaatttatagctgaaaccctagagttgagaatattattgccaaagaaggaatgcttttaggaaggtttctgtttgatgttaagaacctgtttttgtgcacttattctaatttctccacgtggcatgcgaaggagggcagcttctatcctccaactctgatgcaggctggcttttctttcaggggtgcygattgccggaaggcatgctgtggtggttgggcgcagtaaaatagttggggccccgatgcatgacttgcttctgtggaacaatgccacagtgaccacctgccactccaagactgcccatctggatgaggaggtagggtgtccagaggagaggtaaaggtgttacggtggggagggtgggtgtgccagaggctgccatgtcctttacactcatgacctcatttaaccccatcatctcatttttacaagatgaaaaaacaaattcaaattaaaggctgagtggggtggctgacacctgtagtcccaacactttgggagtctgaggcaggaggattgtttgagcccaagagtttttgagaccagcctgggcaacatagtgagacgctttctctgcaaaaaaaattaaaaattagccagatggggtgggcacatgcctgtagtcccagctactcgggaggttgaggcaagaggattgcttgagcccaggaggtcgaggctgcagtaagctacgatcacaccactgcactccagcctgggctacagagcaagaccctgtctcaaaaaaaaaaaaaaattaattaattaaaaaaaacataaaattaaaagcatgctgaagtttatacagagtttgttctgtgtactttctctcttcctttttcttttttctttatttattttttttgagatggagtttcactcttgttgcccaggctggagtgcaatggcgcaatctcagctcaccacaacctctgcctcctgggttcaagtgattctcctgcctcagcctcctgagtagctgggattacaggcatgtgccaccacgcctggctaattttgtatttttagtagagacaaggtttctccatgttggtcaggccggtcttgaactcctgacctcaggtgatccacctgccttggcctcccaaagtactgggattacaggcatgagccaccatgcccgacctttgtcttttttcttttgagacagggtcttgctctgttatttaggctagagtgcagtggcagtccatgagagcccactgcagctttgaactcctgggctcgagtgatcctcctgcatcaaccttctgagtagctgggactacaggcatgtgccaccatgcctggctaatttttaagctttttgtagcgacaggggtctyactgtgttgcccaggctggactcaaactcctggactcaagcgatcctcctggttcaccttcctaaagtgctgagattacaggcgtgacccaacatgcctggcctctcaccaagtactttctaccctaatctgcctcgtggtggacagggattagcagtacaggcactcagattgacctctggcagccagatcccatgtgtgtaaaagtggtggcctcagagtgaaggtgctccagaggcagtcgtgggcagtagtctgctaatagctatggcagcttgttctagatccctgcatcagattcctgagcccaagaatgcgcacacacacacgtgcctgttgacagtgcagtctcttaaatgtggggagagagcaggagagaggcctagtactttctcttttaatcctcccaaagtagtgctctacattctgtaggagaaggagcagtgtctggacataacacgcagggccccaagcctgtttgcccctctgccttgcaggttgacactgatttccctattgggtaaaatggctggtgaaagggagctctttggcatgtgtagaaatgagcacggcatgtgaagggctgtcagaaacagtgtgtggcttacatttgaggccttaacccaatatcttatgaaatagcttangacasttaagaatttaatacaaagctcagggatatccttttcatttctgggtttttttttggtgtgtatttcattatttcatttctgatgtccaaatcccctacccctaggtaaataaaggtgacatcctggtggttgcaactggtcagcctgaaatggttaaaggggagtggatcaaacctggggcaatagtcatcgactgtggaatcaattatgtcccaggtgagtgttgttggaggagtaaggtggctgctggtattgaggatggtatctaggtcatcaaaagaagcctgagagagaagcttgtctcattttatgcttgtagtactaaggtttaggagactgactagcccaagrgtgcacagagttagtagatagaagagttgccacttgcaggcaggtctgcctggtgccagagcctttgattttcatcatgtgctgtacagcttccaagatgactttgtccagggagaaagtgagagggagggcaggagggatatatcactttatcttcatgtagagatcaccctttattttagcaaagttgatggatggatttaaaatacagtataattattgcaaagtgctatgagagtccagaagaggractcattctgccaagaggagggctttacaaagaagatatttgacctgggtttttttctaggctgagaggataaatctagccttttaatcatgtccaaaactgtactcggcatcctcatccccaagttacccctwactcccgtcttttggttagtatcaccattcttccttcccgcaagtctgaagccttttagtttccctcccaagcattccctatattggaccagtctctaaatattaggaattgttttctctctcctctgttctgagtgtcaccactgagtgttaccttctcagctgatgggctgtgataacttccttgcaggtgtccctccctccagctgcttcccactcagatctatccccgtgctctcgccttgccacgttcaccttctggcatggaactctgagcctcttccttcttacttgccagactccttagcctcacactaatttcagtgacctctgcagcctgtgatctcacttgcgcatggtgaatacctgtcttcaacttgtaaagtggaccactttcccttccctgcgcatgcctcgtttgccctttgtagttccctcacctgcattcttagtggagtgggctactctttcaaacagaaaacttcacagaacaatagggcaaaacttgcgtacgtcctcatagatccaagaaaggaacaatctttaacggagcaactactgtgtatccagcacaatgccaggccttgggctacacaactgaataaggttcaacttcaccttcaccttcagctgcttcctccccatstcctctctgtcatgtctgttattccttccaaaccttgtttgatttccccttatcaagggatgatctttccttctctccctccctcctctcccatagaacatgtgtattgtatcttttgttgcatgtgtctcatgtacggcgtcctgtgctctcctgcctagatagctcctcaagggcagtggtcactgtggcgccacatccagcttcctgccatctgaccactggcactcatatctattgaattgtygaagggagttatagctggaagtcttttttctcccttcccatctcaagtttcagatgtagacgctgagctgccaggaacattagtcactgtcaagccttcaccgtttttaacctccctcccactctccctaccgtgcttttaagacagtrgctcataattgatcactcattttcttgtagtgtaattatctaacaggcgataaagaaattgctctcctacaactcctcactttgaatacttgcgatatgacattcaagctcagtctttttatttatttatttttttaattttttttttttttcttgagacggagtctcgctctgttgcccaggctggagtgctgtggcgcgatctcggctcactgcaagctccgccttgcgggttcatgccattctcccgcctccgcctcccgagtagctgggactacaggcgcccgccaccacgcccggctaattttttttgtatttttagtagagatggggtttcaccatgtyagccaggatggtctcgatctcctgacctcgtgatccgcccacctttgcctcccaaagtgctgggattacaggcgtgagccaccgcacccagcaagctcagtctttttaaaacctcgcatcttctgtatcatatttctgcttttggcattttttttttggattacatgtgagaaatggagaagaaaaacctgagtggggatcttgagtgttgcagataggtaggaaatgttgacttaaacatgaaacttgccatccttttcacattgattccttatgtagacaataaaatatgaataaaatcaaagcagtatcttcccttctggtcaacagtgtttttactgatcttgggcatataggcaaattaatgctgatacagctggatgttattgtgttccccaaaggatggcagaatcactcagttacagaccagcaaatgggctgcaggacctaaagactgatatttgcaaatgttcactttagaagcaaacttttctaccaccgagctacttcttggttcatattttgattatttaaatagtttgcatggtccactcagggataacattgtaagtcacttgccaaattaagaatgaatcaaggtgtgtataccttttacaaagaagtaatatttttaaagattcaagtgcagggcagaaagtattggccagagaaacacataaaagtgctcttcctgcttggcttactaaagataaattgagaagggccagatcaatagtgttttatttggaagggttaaaaagtgggaacagattccccaccctaatgcaatccagtctcaacctatccagtgtagctgcttctggactggcctctattattagggtccccaaattaaatgtagaagagtcagggctcagctggatctttagttgatttttgtacatgtgatttcccaaagaaagagaaattctagggctgggggtagataaccaaaaggtttgctcattactgaggtcatatgcttaggctgagtagtggtcactttttccactgaccacatcatcctatccacgaagcactgcatgtttagcagtgtctcgtcaaccctgacagtatttggtttaggagcaaaactgaactcaccagtgctgcgtttagtcatgtagtcaaagatatgtgtctcttacctgtgggaaaacgaaaatgactaacattaacacgtagaaatagatgcagcgggtatttcaagctaactacagtgtgaagacgattgaaacttgtacagagggcaaacctctatctatatttccttggcattttgaaatgactctaggggctgtaagaggaaatgttctgccagtttgctgctttataatcttctagaaacttgaaaccatcccaatgagttgtgttgaccagctccttttactccatataaaaaatatcttacgtatctgtggtggaaagagaaactcttgcgtttggaggctgctttttcaatttcagtaatgtacacattttctcattttgccctcagcaaatttgtgataggtagtgttaagccttctttgcattttggacttcagattaatatggagcccacaggagctgcagaactaacttttttttttgagacggagtttcgctcttgttgcccaggctggagtggaatgctcactgcagcctccgcctcccgggttcaagtgagtctcctgcytcagcctctgagcagctgggattacaggtgcccgctaccaagcccagctgattttttaatatttttagtagagacggggtttcaccatgctggccaggctggtctcggactcctgacctcaggtgatccacccgccttggcctcccaaagtgctggcattacaggtgtgagccaccacacctggccctaatttttaataaaagagctgatgctacagctaatctcttttttttttgagacagagtctcgctctgttgcccaggctggagtgcagtgacgcaatctccgctcactgcaagctccgccccccgggttcatgccattctcctgcctcagcctcccaagtagctgggactacaggtgcccgccaccatgcccagctaatttttttgtatttttagcagagacggggtttcactgtgttagccaggatggtcttgatctcctgatctggtgatccgcccgcctcggcctcccaaagtgcctgctaatctcttaattctggcttcttgcctccaccttggagcttcttctcagttgtggcgatctgatcagagagaagtggtgatgtcgctaaaactaccagatgcagcgcgggagccttattgcttcgaggtctaggcccgcccccagcccctcctggaagtgcactgaagccaagtgtaggatgttctttgtgtgagtgagcaatgatgcatcattgggttttgttctcttgaatagctattctttgctggtaagatttgtagttgttcttgtgtccttttaagggaagtgtaattatattctttgcctttagcatacatttaagtagctgtgtctttggaattggatgttgaattgttcctccagctcacacatggagctcacaaaatgctgacagttgctgtagaaacgatatctggcagctgtgacagagttggatctttgtgcacccaaaaaatttcctttgtaggctttagcaaattaacattttaaaatgggtgctcattatatactgggtagttggttttaagaataaaaaacagttggtattttatttgccacctgagagactacaaaaggattctccaggttctgtaaaaccacttatgcatcttgtgaatttttgcaggtaaaataattttctccctaagaaatagcaaacatctgtcattccatagcttttaagttaagtaggcactggagcctgatgggactaacacaccctacaattctgctgagtttttgtcgtaactgatcwccaggactgtgattctgagacttagttttgatttctcccccacttgaccagatgataaaaaaccaaatgggagaaaagttgtgggtgatgtggcatacgacgaggccaaagagagggcgagcttcatcactcctgttcctggcggcgtagggcccatgacagttgcaatgctcatgcaggtaattgtgaataaaagtttctataagagttctgaaaagctgatcgagttttggctgcttttctccccaagtagaaatgtcaaaaacctactcagaagtaaagrtgtgaatttattgagaaaaagggaagggaagaatagagaaataagatcaggcacattaatagaggaaagtagggatggcataattccagtctgttttggaatataataactttgaaagaagaaaagtgcgatcacactggcttggccaggtctgttttggtttgccttccctttctttttttttttttttttttgagacggagttttgctcttgctgcccaggctggagtgcaatggtgtgatcttggcttaccgcaacctccatctccctgattcaagtgattctcctgcctcagcctcctgagtagctgggattacaggtgtgcaccaccacgcccggcgaattttgtatttttagtagagacaggtttctccacgttggttaggctggtctggaactcccgacctcaggtgatccgcccaccttggccttccaaagtgctgggattagaggtgtgagccaccgtgcccggcctgttttccctttctaacatgcaccagctgacaggggccaggcgagcagccccaaagcatgttaggtgcctcttgactcttagctaggattgaagcatggtaataagtrggtctgaagcagttcattttgtgattgaactggagtgacctggagcttgaaactgaggtgaggattaaaataaccacctcttctaagtttcatttatttcattttgcttagagcacagtagagagtgccaagcrtttcctggagaaatttaagccaggaaagtggatgattcagtataacaaccttaacctcaagacacctgttccaaggtaaaaataaagttttactgatttaaaactttgtgaattgttggtttttagttgacagatactgtgggttcacatatgctccctctgaaggtgccttcagtggttggggttgggttgggggcttgttactactgtgggattaattaaactcagtggataaacattaatacctattttctatgtttccaaagtgacattgatatatcacgatcttgtaaaccgaagcccattggtaagctggctcgagaaattggtctgctgtctgaagaggtagaattatatggtgaaacaaaggccaaagttctgctgtcagcactagaacgcctgaagcaccggcctgatgggaaatacgtggtggtgactgggtatgctttttattcatgttgccatccaaatcttagtatcagtcctgatactaaggcgttgcatttgcacttggcacatgtatgtagaggtgcctttaatttgattttagcattttcacccgtatttgatctcatttgatccttacagcaatcctgagaggtaggtaagaatagattataatcatagatgagaaaattggtcaaggttatccatctagtaagtggaagagtttggtcttaaaacccggtcttaagatagaatcaccttttgctgttgttgttgttgttgttgttttgagacagagtctcgctctgttgcccaggctggagtgcagtggcacgatctcggctcaccacaacctctgtctcccaagttcaagcggttctcctgcctcagcctcccgagtagctgggactacaggtgcaaggcaccacacccagctaatttttgtatttttagtagagagtgtgtttcactatgttggccaggctggtctcgaactcctgaccttgtgatccacccacctcagcctcccaaagtgctgggattacaggcgtgagccaccacacccggccagaatcacctttttgaacccaaaattcattaattcgatggatttactaagcattcatttttattgctgggctgaggttatattaaaaagctagtttttgagaatataaaatgagaaattaaaattatagccgtgtctctacaagataaagtatatttgcttcttacagcaagaagagctaaaatacaggaatcattttttttcttaaagttttttggaaattacaactaagacttttgaaaaagatatctttcagggcttttgtctttctttttctttgtcttttctttctttttttttctttaagagatgggggtttgctctgttgcccaggctggagtacagtggtgcagtcatagcttactgtagcctggaactcctgggctcaagtgatcctcttgcctcagcctcctatatagctgggactacaggcatacactgctatgcctgactttgtctttcttaatctttagattacgagtcattctctaggatctgctaggtatgacttagtgattcagatacacttaattctttaaacctttttctcttttgctttcgtcttgaagaataactccaacacccctgggagaagggaaaagcacaactacaatcgggctagtgcaagcccttggtgcccatctctaccagaatgtctttgcgtgtgtgcgacagccttctcagggccccacctttggaataaaaggtactagtgagactggaccatgggtggtgacaggggacctgcttctccttcagtcctcccaggcccacgcaacctatgatacttatggggtcttcaactcatttcaacaccaggaatgtcattctcacaaacctctgtagtcatgcttttgatgaaggctgtcattggatytccccagctcctgctgtcactgttggccactgcacagggattctctgggatgggtgatatgtagctggaggtgcttttatttgaccctcatagtccactgctacagtaaccataaaggtaatcatagctactgatcatcttacagacactctagagacaatgacaaaccccacagatgtttcaccttgttgggaataagaaaagcctacctttattgaatatatgctttgtgccagatattgtgctgagcagtttttgcatattattctatcatccagtacgagatagtattgtcaccattttaaaatagcagcaactgggacttcagaggtggcttggtcaaaggcacctgtattaagtaccagagtgattcttccatgtctatttcaagctctaaattactaccatactcgcactttaccttcagatttttattgctgcggtactaagaacatgtgtttttttttttttttttttttttttgagacagggtctcactcactctgtcgcccaggctggaatgcagtggtgtgatctcggctcattgcaacctctccaccttctgggttcaagagactctcctgccacagcctcccgagtagctgggattacaggcacgcatgaccatgcctggctaatttttgtatttttggtagagacggggtttcaccattttggccaggctggtcttgaacttctgacctcaagtgatctgcctgtctcagccttccaaactggtaggactataggcatgagccaccgtgccaagctgctgtcttaattaaaataatttttattaattatgataggttcttagagttagctttctctgcttggtgagggtatcacattttgcttgttctagcaattactacaaatgttgacaccgggaacaccttcacccttccacctttttttttttttttggagacacagtctcgctctgttgcctgggctggagtacagtggcacgatcttggctcactgcaacctccgcctcctggtttcaagcaattctcctgcctcagcctcccaagtagctgggactacaggtgcgtgccaccatgcctggctaatttttgtgtttttagtagagatggggtttcactatattggccaggctggtcttgaactcctgaccttgtgatctgcccaccttggcctcccaatgtgctgggataataggcatgagccaccgtgcccagcccacccttccacctattttataaatgtaatcactttgttctgctcttgagcttgtcttaaccccctttcaacttcagcacgagctattccttgttctgcttattgaacccattattttccttttactcttactgcaaattgcctcactgcacggtctctgcctcacaaaaacaaaatacatattaatatatctctgggctgggtgcagtggctcatgcctaaaatcccagcactttgggagggtgaggtggtagattacttgaggccaggagttcgagaccagccaggccaacatggcaaaccccgtctctattaaaaacacaaaaattagctgggcatggtggtatgtgcctgtaatcccagaccattaccctccagcctgtgagacagtatgagactctgtctaaaaaaatatatatctgatttacatttattgcactgataatgtggtaacctggactttttttgtttgtttgtttgttttttttgagacagagtcttgctctgtctggagtcccagctcaggctggagtgcagtggcatgatcataactcactgcagccttgatctcccaggctaggactataggcatgagcagccatgcttggtgtcctgaacattttcaactggcttttggctaatacagattgagcatcagaaatctagaaacctgaaatctgaaaggctccaaaattctaaactttttgagtgctgacacgatgctcaaaggacatgctcattggatcatttcagattttaaatcctggatttgggatgctggatcagtatgatgaaaatattccaaaatctggaaaacaaaaacccaaatccaaaacccaaatccaagcattttaaataagggatactcaacctgtaatccaagtagcccaaaaaaatctagcaattaggctgctttctaacagcctaatctatttatctctatttaggaaaaattatagtctttttgttaggtgtatgtattttaaatatttctgttttaaaagccaaagtagctttatgagagtaggaaattgaacaggttgcctttatgtaactgtcagctgggtgttttaacaaatgccagtaattacaaggaacatatttctaaagataatgagtaggtatatatttgttcatggttttgtcatttaaactcagatttcaattgagagactagtattagaaaacacttgatcaaaactgtccaaatgattstaaaaaataaataaataaatgtgcttagtagttacaataatgcatttgcatttatttgatttctaagtcattggagaagcatgcttaactgagcttccacccttgacctgtcccctaggtggcgctgcaggaggcggctactcccaggtcattcctatggaagaggtaaagtattctgggatttggctgaattagatccccctttttttgtcgggggggagggtgctgaattagctccctttttttccccatgacggagtcttgctctgttgcccagagctggagtgcaatggcgcaatctcggctcactgcaacctctgcctcccaggttcaagcaactctcctgcgtcagcctcccgagtagctgggattacaggcatgcaccaccacgctcagctaattttgtatttttagtagagacggggtttcaccgtgttggccaagctggtcttgaactcctgacctcgtgatccgcccacctcggcctcccaaagtgctggtattataggcgtgagccaccgcacccagcctagattctttattatagctttttctctctggagattagccttttttgtagagctcttagcggacaaatgacttgtttctcagcaaaagcaacacctagggggaaaacaacttaatttgcagacttgtgatacagcttggtttcaaactttggctttcagtgggaatgattattataagcaaatgaccaaatgaagcatggtatcgggaagcaccaacacacagcgatttcagaattcatttatgtaactgcagaaattggaacattacatagacatagagtcggtgctgctcccgtgcactcctcctcrctgttttgaggtgtgtcctcagtaacccagtgtggctgttgatcccagtggtgtggtatttgtggtctctggacatctcattttggaaaaactgcaagttctgtatttgggaggagattcttctgtggacagataattagtcttttatgttttctttttctttttctttttcttttttttttttttttaagacagagtctcactctgtcacccaggctggagtgtagtggtgtgatcttgggtcactgcaacctccacctcccaagttctcctgcctcagccttccaagtagctgggattacaggtgcgcactaccacacttggctactttttatgtttttagtagagatggggtttcgccatgttgcccagggtggtcttgaactcctggcctgaagtgatccgcccgcctcggcctcccaaagtgctggtattatagttgtgagctaccacacccagccagtcatttatgttttcaagaactccctatattgggtgtttgtccactaactgggctgccttcagtattccattggctttaaaatagggattgagctttgcaatagaatgaaagttggaaagatacagagcagctgggagactaatgtggcttctgttcttttgtagtttaatctccacctcacaggtgacatccatgccatcactgcagctaataacctcgttgctgcggccattgatgctcggatatttcatgaactgacccagacagacaaggtaggatgccaaagccccatgaaccccattgaacagttttgaaagtattgaaccatctgaattagtgttggtgtcttgggtgctgaggatgcaggtagcaargcartggggctcctctcattttaaagcccctttcttttctttaaggctctctttaatcgtttggtgccatcagtaaatggagtgagaaggttctctgacatccaaatccgaaggttaaaggtaagctttttttcttccacattttttatattgtatggaatctggaatctgatcattgattaggacataaaagtcttcttggagtagcctattttagatgaagttacrtcagyaatcatagtcttaaagtcatgatatacatagcaaagatggatggtagaggttatttctcatttatctatagattagaagtggctagtgtggaataaatagaacactgacaacctgccctcagctaagaaagaaacgacacttcctttataacatgaacaagagtcaggatgtcactgtggcggcatagcagcctttggagtttgcatcattgggaccttaagcaaatttgttaaatgacttgtttctccgcttacttgtctgtaaaataatacttgccttgccctgaatagataagggtctgtgttaaacagttaaaaccatagttatatctatattttatttgaatttctgtaacaaatacatagttagtaagcatacaccataccacctgacccagaaatctcacccaaaataaatgaaaactctgttcacataaaaatctgtacattaatgtttttagcagctctattaataatttccaaaaactgggaactaatctaaatgtctttcattggatgaataaataaacaaactggtacatccatccaataaaaataaatgagctattgatacaagcaacaacttggatgaatttcagtggcattatgctgggtgaaagaagccagtctcaaaagcttgcatattgcatgcctccatttatatgatattctcaataagagaaaactatagtgctagggaacagatcaatagatgttaagggtatggatgaagggagggtatgaccataaaggaacagcaaaggagaggtgttttgttttgttttttgttttcttttttgagacagcgtctctctctgtaacccggctggagtgcagaggcacaatcacagctcactatagcttccaccttccaggttcaagcaatcctctcatcttagcctcctgagcacctgggactataggtacacacaccaccacacctggctaattttttattttatttttttgtagagaccgtgtctcaccatattgtccaggctggtctcaaactcctggtctaaagcgatggtcctgcctcagcctcccaaagtgttgggattactggcgtgagccaccacgtctggccacaagggattttttgtttttgtttttctgttttttaatttttcaaaaatttattggttggttgtttgtttgtttgtttaagacagagtctcactctatctcccaggctggagtgcaatggtgtgatctcagctcactgcaacctccacctctcaggttcaagcagttctcctgcctcagcctgaatagctggggttacaggtgcctgccaccatgcccagctaattttggtatttttagtagagagaaggtttcatcatgttggccaggctggtctcgaactcctgacctcaggtgacccacccgccttggcctctcaaagtgctgggattacaggcgtgagccactgtacccggcctgtttgtttatgtttttgagaaaagcttttactctgtcacccaggctggagtgccgtggtgcaatcacatcttactacagcctcaacctccaggactcaagtgattctcccacctcacccaactaggtagctgagactacagccaggtaccaccatgcccagatttttatatattgtgtagagaccgggttttgccgtgttgcccaggctgatctcaagcttctgggctcaagcaatctgcctaccttggcataccaaagtgctgggattacttgcatgaaccactgagctcagcattttttttttttttttttttttaagagatgaggaggccaggcgtggtggctcatacctgtaatcccagaacgttgggaagctgaggcaggtggatcacctgaggttgggagtttgagaccagcctgaccaacatggagaaaccccatctctactaaaaatacaaaattagctgggcatggtggtgcacgcctgtagccccagctactcgagaggctgacacaagagaatcgcttgaacctgggaggcggaggttgcagtgagctgaggatgccccactgcactccagcctgggtgacagacagagactgtctcaaaaaaaattgggtttgtgttttacaacacttcttggtcactatgatactatgattatttaggtctaggcttagggaaatcttctggtgctcagttatagggacaaacatgttaataatacctttgtacatgtgtgagtaatgtgaatttgcagatatcgggataaaatcacttttgtcagacccagaaaaaacagggctgggaaaacatgaagaagaggaggcttacacttacgtgtctgtgataagaactgtttgcaaggcctgtaatcccagcactttgggaggccaaggcaggaggatgacttgagcccagcagttcgagaccagcctgagcaatgaagcaaaacctcgtctctacaaaaaaatttaaaaacgagccaggtgtggtggcatgcacctgtagttatacccagctactcgggaggctaaggcaggagcatcccttgaacccagaagttcaaggttgcagtgagctatcattgggccactataatctagcctaagtgacagaatgagacctcatctcaaaaaaacaaaagcaaaaattgtttccaacaactttataaaaccccaaaagaaatcccttcacgtccttcacacatctcctgctttgcacagcttgcacatttcaaatgtatacttatgtttccatgacaagacttatcactagacattcttcaggatgggagtaattcagataagatgctcttgaaagtacacttatccagcaacggcaactgcaccaatgaattgacaactctggctttgagcttctgggagcgatgaattctgttttttttttttttttgagacagggtcttgctctgtcacccaggctgtagtgcagtggcacaatcatggctcactgcagccttgacctgaactctctaagcagactacgtgaagctctccctcttttcttttttttttttttttttttttttttgagatggagtctcacccaggctggagtgcagtggcgtgatcttggcttactgcaacctctacctcctgggttcaagcagttctgctgtctcagcctcccaagtagctgggattatagtcacccaccaccatgcccagctaatttttgtattttttagtagagacagggtttcaccgtgttggccaggctggtctcaaactcctgacctcaggtgatctgcccatctcagcttcccatagtgctgggattacaggctcagccacaggctgagcttcacgcctagctgaagctctccttctttgctagtaaaatcttcccttccctcactaggcatatttrtggcatcccaggttataatcctcgttgctcattcctgaataaactcaacctayttggagataattttttgtaatgtctttcttyaggctgacagtagraaataacccccagctttcagtttttccttctgaatttaagatggtttgcatttcctagaggggatcccatttagaggtaggggtcaaaatttttgtcttacgtttattgtgcttctgtttgtcttattttatgttttcattttcctacactttcagagactaggcattgaaaagactgaccctaccacactgacagatgaagagataaacagatttgcaagattggacattgatccagaaaccataacttggcaaagaggtaccagagcagtatacaagccccgtttgttttggctatattgcacaccctacaccctccagaagagttgttaaaatgtgaggctcagaagcttccatgttggyattttaccagctaaggcatgaccaagatggtgacattatttctttttcttgccacctctctcagtatctctccttattagctatcatcaaatctctttgttggattggtcgaacattttgctggctattcagtgttgactgaaattagggtagttaaaccaaaaatcacattttacaaatttaattttatgcaaaaagttttagtgtcatgaagtagagaaattatgtttaatcacttcttgaatcatgtgtgacctttattcttagaactcttgtgtggcataaatgacttgatttttttctgtagttctctagcttacctaatctttttttttttgagatggagtctcgctctgtcgcccaggctagagtgcagtggcacagtatcggctcactgcaagctctgcctcccaggttcacgccattctcctgcctcagcctcccgagtaactgggactacaggcacccgccatcatgcccggctaattttttgtatttttagtagagacagggtttcaccatgttagctaggatggtctcaatctcctgacctcatgatccgcccacctcaggctcccaaagtgctgggattacaggcatgagccaccgcacccggcctacctaatcatttttttacctcattttattaaattctcttatagcatattaggtagccttcaaggtttaaatacttaccagttcagtaagtaggtttcctggcttcactgccatatgctacttttctcaatgcacaactagtgtagcttagatttcactttgcatcaacaatgcaaccttctattctgtatcactattgagaaagaatcttcatccactcatgcagaatagagctgaaggccagtttattgactgtttttgtgattttccttgactcaataaccgttgctagctaatggccttatttagatgacactctcaatgtctaaaaccacattggaatttctcttcctttgcttcaatagctttagacaaatggtataatattttataaggaataagctaaaagtccattttgaagatttagtatccgatttacttttcttttgcttcgtgtctcattcatgttttctaagcaactagaggcagtcatacctattgactagctattttttacagaaatattagttacatgaaacctgatacttttttcttttgaaaaataagggttggctttaacaacacattacagcaagagtggggggtgtgtgtgtctgattgctatataagacactgcttttggtatgaaattatgacagtctttatggaaaataatttggcatattatcaagtgccttaaaaatgcttctcctccttgactcatttagagtatgaactgggtttttttgttcattttgtgtgtgtgtgtgtttttactttgaaattattttaattttgaaatagaaaacatcttgaaaaaaaaacccacaaaatatataggcaaatttgtactctgtgagcttctcacatccttacactgcttcaccaatctctaagatgaaaaactctgttctaaaacatattcagccatcagcaatgatgttattagtaggaatatggatcaatttaattttgtgtttctttgatattgtttggcatttgatactgaaatggcaactcctgtttcctctctatactcatagtactctcagcacctcacttctgacaccagatgggtagtttttctcttccacaacaattcagctttcacttctccagtggatattgactgagtatcctatgatttaactcaattctgacactaactgtctggagcagatcctacaggtaaagggctcagtcctaaaagactgccccacttcagacaygaatcgcaagtccaggttgtcacctgtgcttctgaccaactggttataaactggagggtccccacaaccccctgctcaggttcatttgctagaatggctcacagaactcagagaagcatttcayttgtgtttatggtttattataaaggatacagctcagaaacaaccagatggaagagaagcgtagggggcatcactctcccagcacctggatgtgttcaccagcccagaggctcatcaaatcatgttgttcaagagttttttttttgagacggagttttgttcttgttgcctaggctagagtgcaatggagtgatctcagctcactgcaacctctgcttcccgggttcaagcgattctcctgcctcagcctcctgagaagctgggattacaggcatgcaccaccacacccggctaattttgtatttttagtagcgacagggtttttccatgttggtcaggctggcctcgaacttttgacctcaggtgatctgcccaccttggccccccaaagtgctgggatttacaggcgtgagccactgtgcccggcctgttcaagagttttatacacccctaacaccttacccagaggttggtgggtgggactgaaagttccagccctctaatcatttggtctttttggtgaccattcctttcctgaggctgtctaggagacctaccataagtaacttattaccataaactcaggtgtgatcaaaaggagtttgtaatgaataacaagacactcctatcacccttggaattccaagagctctgtgagccttttgtcaggaacccatgacaaaggtcaaatatatttcctattacactacacataccaaaagccagaactgagggtacactaaaatgttaacagtagttagtcctgggaggtcgttagttggttagttgcttggtctttgccatgttttttgtggttatataattggatagatattctgtcatcagaataaaaattctctctgctaagtgtgctatgtttcctaaatttccagaccaggcctggcacccagcgtgtttcaaaagatatttgcacttgccctgatttgatggctcctgcatttcttacggtggtggaaagtcaatgagtcatcatcccacagaacaacaacacaaacctcagtcttttgaaaaaatgtagactgctctgtttttcttatatgtggaatatgctttaaaatagattccagatttctagttaactgtttgaattctctagatgggataaaaccaagccattccacattcctttgctgtaaaaataactcctgtgtatttatggtatatgaacatcatttcttaactttaacacatattctagctttgccatccattttgaaatattgatagacaatcatgaaattagacttattgctttaaaactctgctgcttcctttaactttgtggtccttttactcaaaatcgttctatatcttgcctgtctgctgtagtgttggataccaatgatagattcctgaggaagatcacgattggacaggctccaacggagaagggtcacacacggacggtaacaatttgtccctttccaaggaaattagttcagaggcactagatcttgctgcttctctcctcctccatcctctctcatacgaytgatactgccaggtgttgttctgccttctcccttttaaaatggaagtgagtaggtgtgtggcattgagcactcctgacagcttttgcaataaatcccatgtgtcacctgtgtgtttttcccccggcattttttcctggaggtggagagccccaagtgaatatccttgcatagaaattgattaaaattgcttcttttttgtggccatttcactgtatatctccttggtttaagaggtaccatattattcccttgtatatgaaagaaacaataagcgcatgattataagcggccttcatagggataaaatcatagctttttggtcctactataacatttattttaaaaaactgacaactcagggctgggcgtggtggctcacgcctgtaatcccagcactttgggaggccgaggcgggcggatcacttgaggtcaggagttcgagatcagcccggccaaaccccatctctactaaaaaaatacaaaaactagctgggcatggtggcacgygcctgtaatcccagctacttgggaggctgaggcgcgaaaattgcctgaacccaggaggtggatgttgcattgagccaagattgtgccactgcactccagcctgggcaacagaccgagactctgtctccaaaaaaaaaaaaaaaaaaaaaaaatgacaactcagggtcttggaataattaattaatatatttttttgctattagaggattattttcattaagtattttgggtagtattctgttattctatccttttaagctatttgtttaagcctcagatgtaaaagaggatcacttttgcaattcacacttctggtttaacacaaagtttttgctagtacctcttttccctgcccacaggcccagtttgatatctctgtggccagtgaaattatggctgtcctggctctcaccacttctctagaagacatgagagagagactgggcaaaatggtggtggcatccagtaagaaaggagagcccgtcagtgccgaagatctggtgggtacccagacacgccaggcttggcgacatatctgtgtctgttgtcctagggtctttcagcagttattaataacaaaatgtaatgctgtacttaagacattgcaattaattcatcaatttaatcctattttgctaattacaagataattatgaaatgtttaaaaagtacatcagagtgaataatagctggtatgctttagtaatagatcacaagttccagatgatttgagtaacatcttcatcctgtgggcatctctaaaagtgggtgtatgacttcaatttgcagagaacatcaagagtaccattgctttatctttgttgctaggtagttcagctacactttgatggcttaatagagtgacctgatgttaaaagttggtattgaactcttgcgtaatattgcagtttcagctttggaagacacatattgagtttggtatttatagaaatttctgcccagataccagagttacaaataactgagtactctgggaacgagcattgtcgtgctctaaaatagtctagaatggatttctcacatcagtcagcagctgagcttgattaagatgcttgtttctagagttacatgtttttccagatattacatgtgaatgtcatttgtattctatctggcaactttggccaggcgtggtggctcatgcctgtaatcccagcactttgggaggctgaggcgggtggatcacaaggtcaggagattgagaccatcctggctaacacaatgaaaccctgtctctactaaaaatacaaaaaaattagcygggcatagtggcgggtgcctgtagtcccagctactcgggaggctgaggcaggagaatggcgtgaacctgggaggtggagcttgcagtgagccgagattgcaccactgcactccagcctgggcaacacagccagactccgtctcaaaaaataaataatttaataattggcaacttcatagcatatccagaaaaaaaccatgaatggtccaattcaggtgaaagtatcarttggtccaagatggctaacatgggtaagcctagaatgtcaaatattggtttcagaaggttgggtttttttgctggtgggagttgatgctgcacacatttgttttgtagggggtgagtggtgcactgacagtgcttatgaaggacgcaatcaagcccaatctcatgcagacactggaggtgagcagagtgactcctgccttcttgaaytggttttggacagtcagagcagastggttataaagcacacttgcaaggcgcggtggctcacacctgtaatcccagcactttgggaggccaaggtgggyrgatcacaaggtcaggagatcgagaccatcctggctaacatggtgaaaccccgtctctactaaaaatacaaaaaattagccgggcatggtggcgggcgcctgtagtcccagctgctcggaaggttgaggcagaatggcgtgaacctgggaggcagagcttgcagtgagccgagatcacgccactgcactccagactgggcgacagagcgagactccgtgtcaaaaaaaaaaaaaaaaaattaagcacacttaacctgggtagtcaagaccttctccacttgctcatctctttcttctcattcttcctcacacctgtgactgggacgttactgaaataaaagagatgactttatattttccctctgggaagtattcttccttccgattccaaatcaattccataccgttgaatgtgtgatcccactttgaagcaggattggcagctcagctcacggtgtcctggtttccacagggcactccagtgtttgtccatgctggcccgtttgccaacatcgcacatggcaattcctccatcattgcagaccrgatcgcactcaagcttgttggcccagaagggtttgtaggttagtgttttttgcaaaaccagtgaatagactgtatgtttcttttaacatcaggggarttgggatggcatttttactgttgctttcctctttacagtgacggaagcaggatttggagcagacattggaatggaaaagttttttaacatcaaatgccggtattccggcctctgcccccacgtggtggtgcttgttgccactgtcagggctctcaagatgcacgggggcggccccacggtgagtggtgggttgaagtatctgattatcngcagtgtgctgacggccaaaaggaagttggatgacttctgcctgtttcttcattgagttgctcttatcctcgtgattaacaggcagcaaaagcaagggacgggcagacagcccttgtgttggctgccttatcactcacaggcaccgtcagcgctcagcattttaagagggccaaaatcggctgcctggcctacctttcggaggacatctgacaatatctaaacccctccaaggacgtgtactcggctagccccacaaaaaactgttttacgttcagactgttctttttaaatctgcatccctctgtatagtgacactggcaaccagccaaccaaaccagttagctgagacagaggtcagccccttcttgagtatactgttcatgctggacagggcctccacaccctagggagggagtgggggagaggagaatggcagatctgcccagggctgccctgggtaacagagaaacaggtggagactggctcatcctcacctccagcctgaattttgtatttctctgaattcctactgcttagaaattcctactactttttatcctagtattttaacaccttttctttagggcctacatgaaaagacatggtgctaggttttctgaaatcatttgaaaaactattaaattcctgtccaccaggagcttgtattataacttaggaaataaggactccctggcctacaggataaaaatcaaatttgttttggtcagggtttgtcctaatgtagcagttctctgttttggcctcagaacctctttacactcttgacagttattgagagcctaaaagagtttttgttcatatgggttatagctattgatatttaccatattagaaattaaaactgagttacatgtaaacataaagaactttgtaaacatgaaaatgcattatcttttcccagcaaaatttaggcattgtacatttttcagatcttctctgggtctggcttaattgaagacagcacttgatctgttgtgacatcacatgtctcataacctttggaaaagtccattatatgctcaatgagagaatgataatgagagtaaaagggccataagatgttacagaatcttatggaaatagttttgacttcatggaccccttcaaaggattgggtccccggagcacactgggaatgctgccataacaaccccagcacccctatccagtcttagttatccctgagtgccaaaggcactcccaacccagcacactcctttctgctagtagcacaggatagactcccttttttttcccagtcacaactaacattcctctctcttacacccctcactcaccctcacaccatcacacctcctttccttgcttcctcctgacctcacagtcaggataatgtcccataatgctgtgcatggaggggaacatttgcacatatggctctgtcaagagagtaggcctcctgctctcattagcttgctgacgggaagctacctgtaaggtccttgcttcttgctctgcctccacacagccccttctggagttggagcacatagtctcactgcaatggaagagggcagagcttcttaatcactatccactgcccatggtggggcccatgaaatggacaccttcacccatttgctcatttctgtggatgcarcagggctgagccacggcatagatcaagactgggggctggggggcggggcggggaggcaccagacacctccatcctttagatatactctacaaaagagaaagaaaatccttctgtattgttttccctcttgtttgtattgaccctgcaccacggttcagctccaccaatgctaggttggcactgtggaccagttcatgaaaccatggcagggctcatcacgggctctatcgacagacatcccagggtgacttccgcaggcccgaccgcttcctctttccccacactccccttgacttccaaccccactgctatggccttcactcgagtcactgcacctgcttggtacacccctttccacctctcctgccatcgatccggtccttctcacctccttaattcaggtcatagaggtcttccacgctgcccaaagcagtcgattttgttctgtgctgtgtgattggtcacataccctaagtccttagggcaggaaataatcttatactactgtacagcctgcaarcattgcagcgtcttgcctttaacacatraaaagcaccattttaagctaggagatttaaataggaaatgcctctgactctgtttcttttccttccaggtcactgctggactgcctcttcccaaggcttacatacaggaggtaacctgagttatttctcatcacrtgtcctagaaagcaccacaccttgaatcagcatttctccacctggcccatgtggaaatgaatgggttattgctgtgacccagggygcagggtgccaaaaggcctgcagtgtgctgaggagttatattaaatgagtagatagggaagatgyacctcacaaaatagaattgtcccacatagggtgtcaataagccactgccctagaccagtggttgattctcaacagctgattttgaccccggggacatttggcaatgtctagagactttttttattattacaactggaggtggggagtgctactggaatctagtgggtagaaactggggatgctggctaaacatcctttaatgcacaggacagcccctacaacattatccagctcaaatgtcggagtgtgaggctgagaaaccctgtcctagactaatagcagttcccttccattgtcttccctgcattggctgggtaagttccaaatgccattcagatcagaagcaagtagagaccttttttgaaatggcttctcctctgccgatttaaatccatattaacgggccaagatatatggtcaggattctggttgtttttctagacaaagcttcctggatatttatagcatcaaacaggaggctagagaacaactgtgagctcaaatcttttcatatttatgtcatttaccatcaaagaaacatctctaaagccagtttggggtggttacaggaaagacaggccatcagataaggtggcaaggtcacctgctgtcactgctaattcaatttttctgcctttttggaaggcttttaaattatcaagcaatacagggtcactgttcaggccccaaatgaagtatttcaaaactggctagaaaaaattgctggtaccttcagtctgcctgtcttctgagttatggtttgccttttatggtcatttgtctgattcacgcgtaggaggggaattcacagttctggccctcctgccaccccacagcctttcctgtgtctaattacagtgactgcccctagctggcccagctggtgtcttcatttaagaaattctacttatttaaaactgttcttgatcagcgttacatattaattggttttcatgtgactagaggtaaagaattagcagtgttctttagaagctcaaataaatcataatctcagttttcaattattaaaggaaaaaagcataaatcacatttataatgaacctagttgttttccaccttttatcctacctatttctgcttttttgggatcaacaaacattagtgctgggttttgctcgatgattcagtatatgtatttttatagaagactcttttatttttaaaatatttaatgtattgttaagcctacaatagtaatataccctttgtaaaaaataataattaaacattataagaatgtaatatatgtgagttgagtccccttaacagttcggtgcatatttctcgacatttaaaaatttttcatgaattatatacatgtatttttgtgtttgtcctaaaatggaataattaagctctccatggttttgcacctttagtacatcttggacaggttccatgttaacacagatgggtctcactttcataacatctgcatgataaatatttattgagtgtatatrtcataattcattggcccagtcccccttggaggaggtttatgtttataattttccaatgctacaagcagggctgcagtaaacatacttaaagatacatttccttaattgcttccctttagtttgtagtacttggtttttggtgggtttttttgttttgttttgttttgagatggagtctggctctattacccaggctggagtgcagtggtgtgatctcggctcactgcaagctccgcctcctgggttcacaccattctcctgcctcagcctcccaagaagctgcgactacaagcacccaccatcatgtccggctaatttttttgtatttttagttgagacggggtttcaccgtgttagccaggatggtctcgatctcctgacctcgtgttccacccgcctcggcctcccaaagtgctgggattacaggcatgagccaccacgcccagccggtttttggggttttttttacagacagggtctcactctgtcacctaggctggactgcagaggcgtgatcatagctgcagcctctaactcttgggcttaagcagtctcccygcttcaacctcccaactagctggaagaacaggaacacgccaccacaccaggctaattttttaattttttgtagagacggggtctccctatgttgcccaggcaggctgctgtcgaactcctaggtgcaagtgatcctccgatctcagcctcgcaaagtactgggattacaggtgtgagctaccacatccagctcagttctttttttttttttttttttttttttgagacagagtcttgctctgtcaccaggctggagtgcagtggtgcaatttcaactcactgcaacctccgcctctggggttcaagtgattctcctccctcagcctcccaagcagctgggactacaggttcctgccaccacacctagttaatttttatatttttaatagatacggggtttcaccatgttggccagtatagtcttaatctcttgaccttgtgatccacctgcctcggccccccaaagtgctgggatgacaggcataagccaccaggtccggccctttttttttttttttttttaattaacttctcagttgtagagatggggtcttgttatgtttcctaggcttgtctcaaactcctgggctcaagtggattctcctgcctcagcctcccaaagtcctgggattacaagtgtgagccactgggcccagccactggcctgattcctaaagatagtatttatcttatttcttgccctcgttcacggtcgagttcattaaaacctttgaaaacatcactgcttacttcatatttcctggcagtatttacggcagccatataacgaatacctcttctgtgccagccactatgttgttaggctctgtcttctgatggaagggtctgtgctgtgcagagtagagtyaatttgtattatcataaccctatgaatacataaaatctataaacacaattggtaaatataatttgggtaagggtaactaattcctttcaaacrgcaaataagctataatgatgtggcataatgacaggaaacataccagctctttttttcttgaaggctgggaaacaagcagagctctactctagtgtcataggctggagtgaaagctgcagttctccatagcatccactcaccgcactggaaaaaatgcaccaagggaccttctctcttctttcttggcctccttgtcctgatagtgagtggctgctggctcaaggaggttgtttgcctttgaagaagaacctgcagtggttttcaactctctgatctcataggcctttcactgttgtttttacagaacctggagctggttgaaaaaggcttcagtaacttgaagaaacaaattgaaaatgccagaatgtttggaattccagtagtagtggccgtgaatgcattcaagtaagtgtagagtgtaagcgaaaaggatgaatgtggaaaatctcctggagctgattgtacagcactgcttttagctttattttgtttttcagttactgctattggttatagcctgtggttttagcctgcactgtgacaggcattgcntacgtcactgcgggctcaccacctcacccactgagggtcccaaagtcagattcagctcctatgggcccttttcctttccactgggggaagtaacacacaagcctgaagttcaatgttcctttttcatctttagaggccttttatgctaacagaaggtcataggcctatagtgttccattattttactagatctggtgggatgttgtcttgacaaagaattgggcatattactctggaaggggtcatgcaagaacttgtgtgggttgtttaggtattgcattggtggtcagggttttgttataatggcctcaccgtagtagaatgggaagcaaaaaatcttttttttttttttgggggacgaagtctgtctctgttgcccaggctggagtgcagtggcacgatctccactcgctgcaagctctgcctcccgggttcatgccattctcctgcctcagcctccctagtagctgggactacaggtgcctgccaccatgcccrgctaattttttgtatttttagtagagacggggtttcaccgtgttagccaggatggtctcgatctcctgacctcgtgattctcccacctcggcctcccaaagtgttgggattacaagtgtgagccaccgcgcccagccagcaaaattcttaaatgctagtatttactgattccttctggagtgctgggaattttccaagtattttacatggatttaccatctgagtctcataacgtcccaatgaaataagtgctgtgattattcgcgtattaccagggtggaaattgaggcacataaagattaggtaactggccaaaagtcaccagctagtaagtttcggagctgagattcaaacccaggccaaatttcttggttagtgttcgtttatcagtgggtaattcacatgaggtttaatggcaaaaagaagacaattctgtctctccagccattttccatgctttgatatgaaatgcttcctttataggacggatacagagtctgagctggacctcatcagccgcctttccagagaacatggggcttttgatgccgtgaagtgcactcactgggcagaagggggcaagkgtgccttagccctggctcaggccgtccagagagcagcacaagcacccagcagcttccagctcctttatgacctcaaggtgggtgatttgctgtctgcaaaaaaagaaaaaagacgaaaagggcacagtgaagtttctgtgtggctacttctattagagccccatgcttcgcagcttcagccttgcggtttgattcccacgtaggtgacttacacaaccacagcctggactcccagctgtagacagccttctttttatttttgagacggagtcttgctcttttgcccaggctcgagtgcagaggcatgatctcagctcactgcaacctctgcctcctgggttcaagtgattctcctgcctcagcttcccaagtagctgggattacaggcgtctgccaccgtgcccagctaatttttcttatttttttagtagagayggggtttcaccatcttggccaggctggtctcgaactcctgacctcgtgatccacctgccttggcctcccaaagtgctggaattacaggcgtgagccactgcgtccgcccagacagccttcttataaacatatgccactgcttacttacagaggggatttaagcaggaataccccagggtggagggggaaccgttgctcatatcctaacttcgaaaagggtcaaagtacaggtggcagaagagaaggttacatatagaccaaatatgtaattcactgtagcctttaaaacaaggcaccaaccatgtagcagattggtaaggggctgcatcgagcttacaaaatttttctgatggcttttcagtaataggggaaagaagtgtgcccccacgttcacttcctggtaaggtgctgcctcaagttgagggccctcacatgcaaaaccaaagtactccaggaagcttcatcattttttccatcactaagcaaattaaattacacctggtctaagtagagccctgcttactctatgatacaataaagttagttcaggaaaaggttcttattatagggttgtgttttgttttcatttatctgtccagtgtatttcaggatgtgatttgacattaagtagtatggaaacaacaactggaaactttgttaggaatatgagatatatgctgtagttaatttttcctattctctaggctagtttctggcttgatttttttgttttgttttttgttttaagacagggtcttgctctgttgctcaggctggagtgcagtggtacaatcatggcacactgcagcctcaacctcctggacccaagtggtcctcccacctcagccccctgagtaggtgggaccacagacatgtactaccaagcctggctaatttgttttattggccaggcacagtggctcacccctgtaaccccagcactttgggaggccgaggtgggtggatcacctaaggtcaagagttggagaccagcctggccaacatggtgaaaccccatctctactaaaaatacaaaaaattagctgggtgtggtggcaggcacctgtaatcccagctacttggaaggctgaggcaggagaatcgcttgaacccgggaggcggacgttgcaatgagctgagatcactgcactctagcctgggcaacaagtgcgaaacttcgtctcaaaaaaaaaattttgttttattttattttatttttcttgtagtgactgggtctccctatattgctcaggctggtctcgaactcctgggttcaagtgatcctcctgcctcagcctcccaaagtgctgggattataggcatgagccaatgtgcctggcctggcttggtttttaatagataatcatagactttcaaaaacagccataaaaaagcagaaggaataaacttattactcttgagttttagtgttctcttatttctctttgccccttgcagatataatacacttacagttaattaacattgacattgacattctcctgttgagctttgattttataggcaagttttaaaatctgttcagcaatcatccttttagaaaaatgccataaacacaaatttgcacacaaatgcaaagcatttataggcaccctctccaggctccaatgcatagcacccaaggctggaagcccagtccttgaaaaccagcaggagacctgaaagagcagggacatatggactttagaacccrtttctacttgcaacttttatccattctggcaaacaggaggctgccactttttgtcttactcagcgtctgctagtcttaaatcacccttcaaccaaagtgcttttgcttcagaagttctaaatgtgccttggcatttatagagctccagttatgagatgcatatgaaaataatctgtgtttcatctttataaagtccttattgaatgttcactttattcatgcccattatataaagccccttcataaattatcattgtttagttcaaaagggaatttttgtttttatagatagattattgctccttttaaaaacaaaacttggctgggcgctgtggtcacacctgtaatcccagcactttgggaagctgaggtgggtggatcacctaaggtcaggagttcgagaccagcctgaccaagatggtgaaactccgtctctactaaaaatataaaattagccaagcatggtggcccatgcctgtgatcccagctacttgggaggctgaggcaggagaatctcttgaacccgggaggcggaggttgcagtgagctgagatgacgccattgcactccagcctgggcaacaagtgcaaaactctgtctcaaataaataagaacctgcctaatatgttcttttagctttagttgctataaagacagatatattgcctaatttttgtaatttgctcatccaaattacccatgagtagctttgcttctgatttcctttaggcaacctctccgtatgctgttctctttgaatcttaatgccctgaactagtctacacagcatttaagaagccagctccacttctctgaaggctttgccccggaggaaacagcccatgggactgaggccctcaccagttagaccactggtctctgtccactgcactgtttgcttcaggtgccacagaaagtggacatgcccaatgcgtgttgatcatgtaaatcactgggttgttttttctaatacctgggtgattttgattttatgactatttcctaattcctggtgcttgcacttaatcaattgtgttaagggtggcatctgcctctcatatacagactgggagttatgtagatggacattggttgtcttatttcataaacagtgtccccaggtctggtttgacaggactgatctccagtattagaatagaacatctactttttaatttttattattattttaaaatttttattttttaaagagacagagtgttgctatgttgcccaggctggtttcaaactcctgggctcaagtgatcctcctgccttggcctcctcccaaagtgctgggattacagggatgagccaccatacccagcctgaacatctactttttatttatgaagaaataattattcttgggtagtcagcaacactgtttatgatgtacttagcgagagattttaaatatgtacttatgtaagtatatatttaaaaccttaatatatattaatatgtgtatctatatctatatatatatgtatgtgtgtatatgtatatctgcatatatagatataaaaactttacctctgtgggacattttcacttataaaatctgaggcttgatattaaaagaaagtgttcctggctgggtgcagtggctcacacctgtaatcccagcactttgggaggccaaggctggcagatcacctgargttgggagttcaagaccagcctgaccaacatggagaaactccgtctctactaaaaatacagaattagccgggcttggttgcgcatgcctataatcccagctactcgggaggctgaggcaggagaatcgcttgaacctgggaggcaggggttacagtgaactgagatcgcgccattgcactccagcctggcaacagagcgaaactccgtctcaaaaaaacaaaaagaaagtgttcttaacccaatcatcaacctcaaactatttgcttatgtatatgtatataaaaaccatcttctgccccttttagggactctgacctagaatgtggctatgtcctggttaaatgtcctcacatgtgtccagtcatggtgtccccatctctttcttgtgcattagctcccagttgaggataaaatcaggatcattgcacagaagatctatggagcagatgacattgaattacttcccgaagctcaacacaaagctgaagtctacacgaagcaggtagatgtttggttagtttgtcctttcaactctttgcaaagcaggacttggagtcrcaatctctgggtcctcccagccctgccaartacccgttgcttcacttctctgggtggcagccttctctcctctgaaatactgagtttggattaggtggcacagtccctggttctttatttacccataggcgttatatgaatgtgtagaaatccatgaggaaatacagaatgtcttaccaaaatattgagaacgtctccagtttttgttattttgagatagggtctggctccattgcccaggctagagtgcagtggcacaatttcagctcactgcagcctctgactcctaggctcaagcgatcctcccacctcagcctcctgagtagctgcgcctacaggcacgcaccaccacacctggctaatttttgtgttttttgttgagatggggttttgccctgttgcccaggctggtcttgaactcctgggctcaagcagtccacccatctcagtctcccaaagtgctggaatttataggcatgaaccactgcacctgaccctctccaattttattctcatatctactccaaactattattttaaattagttttatgttatttccatagatggaaataaaatattcacttgtggactacagttgtgagtacctaactccctcacccaacagttctttttttttttttttggcttaataaataagctggaggacagcaagatagagatgtatataaagggagttggatgtttcgaataaattgaagaatccatgtaatcacagggcccagatggtcattgctgggttgtcatcttttcatttgtcctccctctcttcccttctttccccagggctttgggaatctccccatctgcatggctaaaacacacttgtctttgtctcacaacccagagcaaaaaggtgtccctacaggcttcattctgcccattcgcgacatccgcgccagcgttggggctggttttctgtaccccttagtaggaacggtaagtgcatgctgcaagggagtagtgggcgcatctgcacttctcgtctgaagtgtgttgccgaaaccatcaagcaaatgccaagtgagcagagttcactgcccagaagaaaattggaatcgggcctattatgattgctgtggatcataagctataaagcaggagctatatagctcttgctgtggaccatcttggtgtcaaatcaagaatgatgccaggactactcatactgaataaaaaattctgtttcccagggacagtatgctcttcactgaatctaggatgagcccagttgataggctggggtagtgctaacataatcacagttaatgtttattgggagccttacatagattaactcagtccccccacagccctaggaggtagggacagaggttttactgacaggcctagaacttacgtctgaaattcagggggttcattatttttaagtaaggaatttccccattaaaaaatgcaaatggacccttgagatatgaaaggtgaggttgcttatttacgcttcaaggtgaacaaggtgtccattgctttcttatcttacagattttatgcatattcaaagaagaatattgccagttgggaagcagaggggagggatgcttaaggacataatcatagtttgggctgacattgttccaaggttaacttggatcctgaatctaggttatcccctaaatctgccctgtatcctgtatctacagattgtactgccatgcaatacaggactgaaatattaaactaaatcaacacacatggaaaagaaaccaacatacatccttttggatttatgtcattctttcagtatagtaagaaagtggtaggaggtggcattatagagttgaaaacgtaggacattagagctgaattcattttcacctcttcagatcttggccttgggcaaattatgaaaggtgagagccctgctgccctcagctcacactgtaggcaacatcatcacatcacagtggtgcttagcacaaatgcctgcatctcactgcctccttagctctctatagagagcagaaggcttagacttgctatgatgtacatcagtctccaggatttgtagaaatcccttgtggtaggaattttccaccatttttacccagcaccttgaatagtgcagaaatatgtgttgttctttttggagaagttgtcagcagctaccagctgaaagacgggtagctgtactctttcttgtcacttttgatcttcacatgaagaaaagggtaacagtagaggtgaaagcaaatctggaagcagtcaggccagtgagagtcaggctgtaaggtggagagagacacagcctgccgaactcaagactttctcatttagaacaaagtatgtgtcagaggcttttaactttaagttggaccaaggcgtttccacacatgatcaaatggtttaatcactattctaacaccttccagttgccgttggggccttaacgagactcagattatttgaatattttctatattaattcaaagtgtgatggcttattttcagaactttatatctaggttcatacatgtgcgtacacataatattgtctttttttgtattttttctgattatcagtgaccagtgtttaggagggaaaatcctcttggggaatgagtgaaaatatcaaaaatcctactcatcactgtttagggaaccatctttagggttttctgctgacatgcacatgcccgtctacaacaatgggcatgtgtcttttatctttataatgtcatcttccggtttttctgctgtgtctaaggacccatcctttcctctctcctacttgtctcacacctagcacctccttacctcttacacaatataagaatataaaccagttgtcagatccctataatgtgttttggggaatattgattggtactcagaagtcagtcagaatgaggttttctaaagtattgatgatgttttgtgttacagaagatgactctttttaaataacctttttatagttaagttttagaagtaacctaagctgttttcctgtctagatttgatttggaacttgtgtgtattcattatataggacattgttacagataaaaatatacggagttttcacttgcaagccgtacatatttgcatctaagtagaaatttgtcaaagccgagtctttagaaaagtagtgagtacaaatataatttgtaagcattacaagtttagttttagaaggccattttgggccagtaagaatggtgattataaaaccatctagattatgtacaaaagtgtcttggcccaagttaaaggatactaactcctaccatcgtgttgctgaagcaaaaatcacatgggcagctcagctagcaagactgaacgaaacaaaatttaaaagcagrcaagccctgtacctccttttggtcttgcaaagcgtgagctgaggaggcgagtgagcaactcctctactccccagcactcattcttgtaaggtgaaggtggaaacacctcctgctactgcttgtgaccacatggaagatgatagtgaaggctggcatttggtttgcagaaggacatgaggaatcagtttcttttcttttccttttttttttttttgagatggagtcttgctctgtcacccaggctggagtgcagtggcaagatctcggctcactgcaacctccgcctcccaggttcaagcgattctcctgcctcagcctcccaagtagctgggattacaggcacacgccaccatgcccagctaatttttgtatttttagtagagatggggtttcaccatgttggtcaggctggtctcaaattcctgacctcaggtgatccatctgccttggcctcccagagtgctaggattataggcatgagccaccacgcccggcagggatcagtttctgagttttttaacaggatcagtgacttgatttttaatatgtaacaagagtacccactttattgacaactataaaatgatgttctatctttatgccttgggctttctttctgaaggaaaagtgaaagtaaagatgactttacgtttattttagacatggccttgctctgtcgcccaggcaatcggatgatcatggctcactgtggcctcaacctcctagcctcaagcaatcctcctgccttagcatcccaagtagctggaactacaggcacatgccatcatatccagctaattktttatttcctgtagagatgggggtctcactatgttgcccagggtggtttagaactcctggcctcaagtgatcctctccayctcagcctgggattataggcgtgagccactgtgcccagcattagtttatttgtaatgcttttttacatcctagatgagcacaatgcctggactccccacccggccctgtttttatgatattgatttggaccytgaaacagaacaggtgaatggattattctaaacaggtaagttgttactgggtaataatttggcttttttcctcatgtagcttatttatgaattatagggctcaaactgacgctataaaaattcacattctaatgctttcaaaacatttcttttcagacttccctgaggggagaggggatagtaatgagagttggcaataaccaatgaattgaaatatttatatttcaacacatttttggaagaagcgcagcatggcttgtcacaggttgacagtgtaggggagaaaactgctgtccaataaactacagaggaaactacaggagaggttagactccctctgctgaagccccaggaggcttggggttcagagttgatgacacattgcaggtcaggaacagctgacggtctgtatactctgaataggtagttagaaggcaagaattagcaaatgtcttaggaagtataatagaaaagagaaggaaacaggaccaatctggcagttcttagggccttaggtgaaagggccctgagtaccgactgcaatgagtgacattgcattgtttgatatttttgaaatttcaacaggacgtgtctctccttaggcagacccttggggctgaagcagcaagttgcagtgtgcacttatatccctagacacatcctgttgaaactgcaaaaatatcaaacatgaaaatcctaacatctttctccagagacgaaaaaagtggcttgcctatgaaaagaatgagaactagacttaacgcccgtcttactggcaataagaagcttttagacaatggaggagtgtcctgtaaggtcacagggaagatgactttcaacatgtgctcacacctagccgaatctatctggatattttcagacgtgcaagggtttgccaccccacatctcttcctaagaagttatttagcaatgtacttagcaaaatgaggaattaaccaagaaaaaaggaagacgtgagttttgggaaactgaaccctcatttggacattagcgaaggggcattctgataaccatgcaaatgacctgaagttacaaatcctgtgtggaacaggttgggggagcacctgagaaaaactagaaaaagcyagaaaagacaaggatatcaaagggtcatagtataaaacaaaagctcttgcattatttgagaaagttaaggtccaagtagaagcaaactgtagtttgatgctagaacactattctttgagagggtatgtgtgatactcgaaatgcagtcatggctcacggcttggtctggtcttgaacagtattcacacagtactatggaaataccatgcatcattttcaagtccatttatggacacgccctagaagagctggtggcaggaaaggatgtaaatgttaacagctttggcaatgtgagtgggtaatggtgcagtatggaaggaacaggaaacatttcagtgcttagagaaaacatttatttcttgtttttccttccagatcaccatccatcttcaagaagctactttraaagtctggccagtgtctattcaggcccactgggagttaggaagtataagtaagccaagagaagtcagcccctgyccagaagatctgaaactaatagtaggagtttccccagamgtcattttcagccttaattctcatcatgtataaattaacataaatcatgcatgtctgtttactttagtgacgttccacagaataaaaggaaacaagtttgccatcttggtgttgcaatatgaattacagccttaacagactgtgccacaggtctctgccatcctttgtgagctcatttgtcaggcagacccttgggctgaagatgcaagttgcagtgtgccctttatgatactgttgtgtttagagggaaatgtatgcatgcttgtgtatttctgagaggacacataattcaggggacctcctgagagggttgggttggaagttgatgacttaccttttaatcttatacctttctatattgttgaattttgtttttctaccctgaggaagtattgcttatacaagtttttgcctgaacttccttggaattcccatttctgtcacagctttagcactgtctatgtttagagtgctcaagaaggatggtcatgcagcattagccttaggtgagcctctattctgttggtgcagcaagtattcattgagtttcttctaaatgcctgggctccacccttccctacagactttttatttttatttttatttttttgagacagtgtctctgtcgcccaggctggagtgcagtggcgcgatctcagctcactgcaacctccgtctcctgggttcaagtgattctcctgcctcagcctcccaagtagctgggattataggcatgagccaccatacctggcccagactttctttttcctaaaacattaggttggtaaaaaccacaattacttttgcaccaacctaatattttttttcctcctcttctggctgggcgtggaggtggctcatgcctgtaatcccagcactttgggaggccgaggtgggcggatcacttgaggtctggggttcaagaccagcttggccaacatggtaaaaccctgtttctaccaaaaatacaaaaattagctgggtgtggtggcaggcacctataaccccaggtacttgggaggctgaggtacgagaattgcttgaacccaggaggcagaggttgcagtgagccaggatcatgctgctgcactccagcctgggagacagagctagactctgtctaaaaaaataaatcaaatatttttccttctcttcttgttctttatcttctatctctgttcttcctctcccatttgtttccttccctttttccccttgtctccctccactggatccttccagaggatgctgcatcccactggcgccagtgctaaacactgctgatgttggcaaagcagtatttttcccagtgaccttggttttattatttttaattccctaggtccatgtcaatgttgtaatacagtcaattttacagtccacagaaatgatagcgctgccttgagaggcatatggcaaaggggtcacagtgcagagccccagctctatggcagagagcctcacccacctccctgcctccacatcctcaccatggaaataggagcactgttggtacctacctcgtgagggcggttctggaattactcaaacacatcatctaagatgctttgtacagggcctggcacattgtaagcacttgtcagttcctgttgcacagcatcctccaggccctgtttgcagagttaattgcttctggtactttttttttccttttttttttttttttttggcagggggggtaggggggttgggacaagagtcgtgctcttttgcccaggctgcagtgtagtgacgtgatctcagctcactgcaacctctgcctcccgggttcaagcgattctcccacctcagcctcccgagtagctgggattacaggttcgcaccaccatgcctggctaattttttgtattttcagtatagatggggttttgccatgttggccaggctggtctcaaactcctggcctcaagtgatcctcccacctcggcctcccaaagtgctgggattacaggcgtgagccactgtgcccgaccgctttctggtacatttcttaatgtcctgtgaaacttcacctggaatgggatttgctgggaattcattttgtagacaagggaaggatgcagtcttgtcagatatggtgacttaaggatcatcttaaaggatttaggtttcctaatatcgccaacagccacatgggtttaaatcctcaatactggtaggggctgggcatggtagctcacacctgtaatcccaccacactcagctgagttttgaagttctgttttttgtagagatggggtctcactgtcttgtccaggctgctgaggcaggaggatcacttgagcccaggagttcaagactaacctggacaagacagaccccatctctacaaaaaacaaaaccccaaaactcagctgagtgtgtggtgcacgcttgtagtcctagctccttgggagtctgatgtgagaggtttgcttgagcctaggagttcgaggccgcagtgagctatgactgagccaccgcattccagcctgagcaacagagcaagaccctgtgtcaaaataaaaaagacctatagaagcattagtgcttggggtaactattagcatgtgctggcagagaaggtctagtgcctttaccttggtgctaagagtccctccagattagtggctttcccgtgccctttctcttctctgggctgctaatgccttccttccccttattagtaatattactgataaacaaattgtacattctctgatctcacttcagaggctgtttctgtgcactgaagatgtacacacagtcttaattcaaaagagatagcatttatgtgctgccacattaaacagattgcaacagtattactattgagtttgtgttggctctgtgcaaccctcatggtgcccaggaacagatgaaaccaccagagacttggagcctcaggttcattcaatggtgtcccagggaacggggttggagggcttattcccagaaggcctctgaaatgtaagagctattaacaaggagttataagtcatttttggtagctataggcccaggcaatgggtagagatcaagatgggataaatggtaagatcagtagagtattgctcagataaatatgtaagctattttactggcacactgtatctagtgatattaacatgataagctataggtaggataatttctcatcagattgcagaaatacatttatagcctatttcctgttatataatgaaaagctactaatggggtagtagacaatgatatgggtaatagcttaaacagccttcgttgtcacttacctgaattcaggaatgacaggtttctttcatgcatgaggtactggatacattaaacacacacacacacacacacacacacacacacatatggcattgagttctagtcatatcctaaagaaaaactatggtgcgctatgttatttatagtactatactctgtgtgagtgactctgtgtgtatgtgtgttggtggaggtcagggatgacttgtttgtaatataccttaaggaagtctgtccgaatttgcccttcaaatactaaataaattcatctctcacctcaaactgcctttcagttcccttttactaattttgtttaaaagaaaggcaagtgaaggccaggcatgggggctcacacctgtaatcctagcactgtaggaggtcaaggcaggaggatcacttgagctcaggagttcaagaccagcctgggcaacatagggagacgccatctctacaaaaaaaaaaaaaagaagaagaacctgggcatgtggtcgcatacctgtggtcccagctgcatgggaggctgaggtgggaggattgcttgagccagggattgtaccactgcactccagcctgagcaagaccctgtctcaaataaaaataaaaataagacagctattttaccctgtcttcacctaaataagctcatcttattttttgcctgaaactcttgcaaactcccaggtctgctagttttgagaaaccttggatctcaataaggaatagttctcaattgcttataagcataatggatttcttttggcttaaagttcaaaactggcaacaagcagcgctagcaacccatagagagatacgcagaccatttcgatagacgtgtttgctgagtgaacaaggctgactgaatttttttttttttttgaggcagggtctcactttgttgcccaggctggcgtgcagtggtgcagtagtggctcacagcagccttgaccttctgggcccaagtgatcctcccttctcagcctcctgagctcctgagtaactgggaccatacgtgcaccaccatgcccagctaattttttagatttttttgtctccctatgttgcccaggctggtctcaaactcttggactcaagccatcctcctgccttggcctcccaaagtgctgggattacaggtgtgagctactgcgcccatccctgaattcttaattacaactaaactagatgcttatggattttcctgttttacaactcttgcctcttttatctgtaattttaagatcttgacagcttatatttggctttgcttttgtgtctcaagagttctttccttgataagcctctgtggaaactacagaatcttacaaatataaaacatttccggaaaaaatacaaaaatggacacctgacatttacactccctaaggtcgtgatcctgttgaagaaaggagatgaacgcggctgcttttcagtagttcttcacttcaccttaccaggttcttcatctggatgctatgctatgggggccagaggaggaggctgggattgtgatggatcctactagattttacagctggagctcccaggaatgccctcatagggaatgtcctgaagggaatcatgggtaacttgtaagctacctcaacttatttttggaactatgtaaggtataagatggatggagctgggttcctgtgcctttctcaccttgtccgcatagagatgcagctgctcctgcaggccaaagttctgcaccaatcacctccacctgcttcccactgggagacaaaggtttgaaagcctgtttggcgatgaaccacgatgatctgacactcaagccactcctgagaaagtcgggtttctttctgtttccatttatatatgtaattttcgcttcaaacaaacatgacctcgctattctatgcacagttttgaatcctgcttttaaaatgcgatgtctgccttgtctttaaatattctgagggggaggagaggagatgtgtaatgcgactgtctataatttgaaaccggacctcactatttagcgtctcagaaaacgcggggttcattgccctggtcccccccgccttcccccgccccccgaaccttccggctggctctcttgcggtccccgcctcggcgctgatgtggtctggcagtggagattggcgcccgggcggagcacgatgggcttccccgcggcaggcaggcaggctgctgctgcaggtgggtcccggcgcccgcgccgccccgcgcctccsgcggtcgccccgcccctgcccgcccgctccgctccgctcgcattggcgctgcctgctgtctgtccccgcgcggtggggagggggcgcacccggcggcgggctctgcagagggcgccttgctccgggtgcgaccgcggctccctggaggcctgggcggcgggccccgcgagcgcgccgccacctcgggagcagtgttggccaaggaccccgacgccctacgtaagtaaaggcagggcggggagcctgcgggggaggagggtcgggggcaatgtccggtccgcggaccgcggagtgggcaagaggtgcccactggatacggggtatccgagccctctgaggtgctgggagtaagaacgcgggaggtcgcttgtccgctggaatccgcggccagggcgaccctcatcaggtctgcccacctatccccttcgcgttacagcttgtcttagaagcatgggttgccggtggcttttttccttctttatccctctttgagaaatgtgattttgggtttctggccattacattataattctgcagacagcctgaagctgggttatctgttccacgcccccggcattttcctttttgagtactttatcctgcgctctgtctcctgccataaggggcgtcaagccagaattcgagattccttc

SEQ ID NO: 96099 - DNA, 88341 bp, Homo sapiens
  misc_feature (1)...(88341): n = A,T,C or G
attacaggcatgcgccaccacacccagccaaataaaaaatcatttcttagagttttcaaggtgaacaatgttgtttagttggcttccattttgtatctgctggtaaaatattcaccatgataaacccaaaacaggactgtgagtcaatacttttgcacaggttttcagtaatagagtatatgtaatgattaataatatataatgtaatttatttcatatcaacatacaacacaataaaataatgcagccatgtagtattgatgatttattgatttctgagaagctcacagctgttctttgtgccatgaaatcattgtactgcatttagaaagctattcttttgttttttatgattggaaacattttatattccattttgtgtaatacagaacattttaaaatacatttcacaatttctaaatttcaatataattattaaaaaatgattacttcagactagtctcttacaaatgttactaaacacaaatattatacataaaaggccatcttcattaaatagattagaatgaattactccttcagctacattcccactgtaagagaatacattcttggggaatatattctgtgtatatgtattatgtcttattttatgtttttatcatttatatatatttttcatttttaatcttttctacttaatagatttatttatatttatacttttattttatactcatttttatttacatggtctctgtagttattagatagtgagctcttgaaagataaggctagtattatgttcattgtcattatcatctacaattatgttacacaaacaagcactcaaatgttcattacaatgactggaaatcatttgaaccatttaacttattcagtgtctattatgtcagggagtacagcaatgaataaaacagaccaaaaaaaaaaaaaaaatccctgccccataaagcttacattttggtggagaaagacagatagtaaacaaatcaatacacaaaatataaagtctctgatctagtgatgagaaaaataaagcaggggagtgagattaagctattaccaaagggggtggcactcccattttacatggggaggaaggaaagatctcaagaaaagggaaattggggttagattaaagaatttgggccaggcatggtggctcatgcctgtaatcccagcactttgggaggctgatgtgggaggactgcttgattctagcagttcgagaccagcgcggggaacacaggaagacctcatcactataaaaatttttagaaaaaataaattataaaaaaaagaaaaagaaaaaaagaatttgagtaaaaactataagaagggagggcaatccgtgtctatgtctggggcggagctctgcagggagaggcaacacaagcatcagtgctctgaggctgcagcaggagaggtgtacacagaacagcagggaggccagtgtcaaggcagtgagcaagctggagagtgcaagggaaggggccagagaggtgaatggggttctctaggccaccttgactttgagatgagaagagagctttgagtgaaggggtggctttgcttacatttttaaaagttcagtctggctttttcattttgtcttggatctttgaggctgctagaacagaatcccatacactgggtaccttgtcaacaacagaaataaagtccaacatcaaggcacctgcagattcggtgtctggtgagggcctgcttcctggctcataggtgatgccttctctatgtgtccttatatggcagaaggagtgagggagctctgtggggtctcttttataaggacatgaatcccatttatggcagctcggccctcatgacccaaacacctaccaaaggctccaccttcaaacaccttcatattggggattaggtttcaacatatgactactgggggcacctaaacattcagtctatagcaagtttgtattagggtacagggggacaagagtgaaaagagggagaacagttaagagattagtgtaagaatccaagtaacagatgatggtggcttggaccaggacactggcagtgggattggtaagcagtgatcagatgctagatatatttagaacagaacttacaaggagtgagaaaaagagaggcagcaagaatgattccaaggtatttggagtaactggaaggatggagttatcataatagagatcggggagactgagtgcacaagtttggaagggaagaccagcagctctgttgtggatatgttaagtttgagatgcctattggagatctaagtggaaatgcaaatagacattagacatgaactctggagttcaggagagatccaggttggagatacaaattagggagttttcaacctataagtgttatttaaaacattgagactgcctgagctgacagggaagttagtgcagacagataagaagtctgaggactgaatcctggggtaccccaagctaaggtatccaagatattagaaaggcaaggaaggaggaaaaccagtgtgaggcaccacaaggacaatgtgtttcaagaagggaaatgatcaactgtgcaaatattgctgggaagtcaagaaggaagacttgagatcaggactgagacctggcccttggatttggcgatatggaatttaatggagagttgataagaaacgattggaaaacctgattagaatgggcttgagagagttggaagagaggacctggagacgttagtagtagcaaatctttcaagggtctccgccaatgagtcatcgggaggtagctggagaaggagtggaatcaagagggttagagatgcacccccccccaccccctcatagccaggcgcggtggctcatgcctgtaatcccaggactttgggaggccgaggcgggcggatcacgaggtcaggagatcgagaccatcctggctaacacggtgaaacaccgtctctactaaaaaaaaaaaaaaaaaaaaaaaaattagccgggcgtggtggcgggcgcctgtagtcccagctacttgggaggctgaggcaggagaatggcgtgaaaccgggaggtggaggttgcagtgagccgagatcgcgccactgcactccagcctgggcgacagagcgagactctgtctcaaaaaaaaaaaaaaaaaaaaagcccctcaccctccacgctgccaagaatgagaaaatggcatgcttgagggagatctggatgatcaagtagaggaaaaatttggtgttttaggaaaggaaagggagaattgcgacagtctttggggggtggcgcgtgaggggagggagatgacctggtcctaggtaggagatggggcagtcattccatctaggggaataggagggacaggaccgccgagtaggagggcacagatgatggtgggcagtaaacttggggaggaagttaattacctagcgggataatagatgagttctttccattttccaaatgttccaatatgtattactacacagtttcacaagatattaaaggaaacaattcattccgacatacggcttgtatgagtgaaaacagggagaacggtgagagcagttttaaaacttactccctaaacgcactccagggtcggaagcgacctctaggggttcatttagaccattacttttttctttttcttgctcttaaaagtataaaacagcacggtccacatttaatattatttttaaagaaacacgatcagtttaatttagaaaagagtatcaggcatgtgagtaaaataaacataaaccatctgcagtccaagctggagttgctattatcatgactaagagttttctctctaaatatatcattctctatagcaccattaatatttatgttcattctgcttcttgaatgagtggttttattaaaccaagaggagggacaactagtgggctatttgatccaggtcttcttgatgcttacatggagtacaaaccccacatatttttcattgctggtttcacttgatttggtgttgtcactgggtttcctctgcctgggatgttctcatcccctggattaattaactcacttcctcatgggagtctttccagaccttccaggctaccttagggtccccccatcatgcaagctcacacactccatgcttctttctgcctcatcccatttctcccaactgtcatgaaagagtcaattctgtcattactgtttaatgttttttctggtaagtcatgagacccataatggcagagactgtgtctggcttgttcactgctgtctccttagcacttagctcagtgcccagcacttaccctgtactcaataaacattaattgaatgagaacacactatcctgccggagactcttgcccatgttcctattcacatcttttggatcccactgcagaggagactgaatttcagagatgaatttttatttctaaaatacagtttgcaattgctttaggtgcatctgtgacagatgcaacaatttgtcacaaaactgtcccagctattctttcaatagcacagtcttcaggattgaagcgttaagtttccagctctcctgcaaagaaactctttgtgacaaaggctgaatccttagatataaccctgaccttatcagaccatttatttcccaaaatataactaagggaaagacagtaagatgccaatacagggggcagtataatgagaccatttcacattgtgcagccttatccatgggtcctaacccatactgtccccttatttccagatttggtaatattctggtgcctctaggtcttagttcagcaacagtaccactaaaatggacatggtggtagtatttatccacctgaggtctttaggccagcccagcctcatctttgaaatttttgtgagtgcttctatttactaccagagactgagaacaggggaatggctggttgtcaaatgtcactctggtctataatccctggatcctagacatgtgacatggaatggagtgggaacagagtgaagtgctctgagcaggaagtaaagcttgtctccaagtgtacccggaatgtctgttatcataccttctataatctcctacatacaactcccccagtttaatctcttggtattataatttttggtgtagtacttttgatgcatgccctaaaataaattctcttctattgcttgtccaaaggtagcagcgttttcctaaaaatcacaactttaaacttggttgttctggaggcaagtgtgatgagtaagtccactccataagaatcaataagaatttcttttattctagctgggcgtggtggtgagcatctgtagttccagatactcaggaggctgaggcaggagggtcacttgagcctatggtttttgtttgtttttttgttttgctttttttttttttttgaaacagggtctcgctctgccacccaggctggagtgcagtggcacaatcatagctcactgcagcctcgacttcttgggctcaagagatcctcccaccttagcctgtcgagcagctgggactacaggcatgcgccaccacgcccggctaatttttttgatatttaatagagatgaggtcttgctatgttgcccaggatgttctaactcctcaagtgatcctcctgcctcagcctcccaaagtgctggggttacaggcgtgagccaccgtgcccagcacatgtcttctaaaagctgctgtttcttcctttttcaggagttctttcccatactgttcttctggatgactcctcgtcatccttcggatctcaaatgaaaggtcatttagagaggcttggcctgaccatacaattcaattagtttcttacccctttagtctctctcatagaccctgttattttccttcatctcatttatcacaagtcttcatatatttattgcgttggatacattcaattctgtcgattttcttagaatgtaaggtttccaagggaagggacttcgttttgttcacttttgtattcctagaacctagcacaatgcctgacacatagcaggtgttccataaatatctgcggactgactgtctatttcacttatccttgttccttstactgcatttcagttctcgctactgcagtgtaacctccaagagacaggagaaaatcataatacccccctccctccatcactgagtgatactgagacggcgtccttgcacgtttgagcagctgctgccttctcctgggaggctgtcaagtaccccaaggtgcacaataattcttttagtaattgcctgactgaggcaaatcagtagagctgtcagaaatgctttcaaacttaacattcattgggttcttgggcacctgaaattgcaaacaattgcattacaattaagtgagaattagcagaatgttacagttctttaacaatttgcgtaacaaaccgaggcgtcctacgccatctcgctgaaatgaaattcggatgtagacacccttgcgcttcaggactctacgctcttgcagcagctcctctgcccaatggggggcggcagcatctcagtaactcactcgaaagacgggtaggcgggaggagacattcgcgttcaaaatctttttgcctctatccgctcgccgtagcgctttagcccgctcgagtttcaatgcgcgttgttgcttaacgaagcagagtcctacacactgtctgctgctctcctgatcatggcttctccgagttctttcacctactattgccctccatcttcctcccccgtctggtcagagccgctgtacagtctgaggcccgagcacgcgcgagagcggttgcaggacgactcggtggaaacagtcacgtccatagaacaggtgaggtggcaggactgggcgaggcgcccgcgcgatgtgttctgggagcgcgagtcccgttcgtagggccgcccgggtgcggaactcaccggggaactacgactcccacagcgcaccgcggtgcctttcctctgggaagctccgggcgcccaggcttgggcttcgtcgtggagcgtttgcgcggccagcttggggaagggtcgtttcaaggttgggcttggaggagagggcagtagccgagtcccctctgccctaaagaacgagaagaatcgtgttctatgcctggaggacaraggcagcccgtgcgggtcggacagcccactctgttctgccagtacttcgggaggttctggggtgcatagtgcacttttcccaacctgccctcagcttctggaggcagagagcagggccaggctgctgtcatgccgtttcacgatctgtttaatttttgacctacagtgccaggtttgggggcccgcctcgtgggtgggcattttggtagtcattcagccatttgagcaccagctacgtgtcggacacaatattaaacgatggaagtacaaggaaataaaacagctcctgaccaggagcctggttgggggacaggcaggaaaacagtttggaaagtgatctaatagaaagaatggattttggactactaatcattccctaaggcctagaagtaggatcgaacctatcattttgaaaagtgtttggcgaatgagtatatattcatatgcccaaaaccatagttttgtttttcttcttattccctaattggaattgttcccaaggttgctatgtggaactgtttatccatctgtccctaggagaagtggttaggataattcttaacactaataaatgaacattctgctgcttactgaaataagatctcttagtgagatcagtctccaggctttaccttggagagacctgttttgtatttcctactttaagttggaagcctgtactttggcaaaattagtaacaataattgttttattgtacagttatgactaaatagaattataaatttataacagaaacaagggcttgatacgtggttattcacaaagtagcagagaaaatattttaactggagatttaaacttcatggaatttagggtagcaaaggaaatcctcacctctcgaatctagctaattctccaggttggtttgcctaccagtgtgtcccagggaaggctgactgcaaaagattgtaaagaaatttcccattgatgaaaaacctacaggatctttgcagaattcctaaatgatggattgctgagttgattcaggtcaagtgttttacttattatctgaccttagactatgggattgcctttttttttttttttttttttgagatggggtctcgccctgttgccaggctgggatgcactggcttactgcaccctccgcctcccgggttcacgccattcgcctgcctcagcctccagagtagctgagactacaggcgcccaccaccacgcctggctaatttttgtattttagtagagacaggtttcaccatgtggccaggctggttttgaactcctgacctccagtgatctgccctcctcggcctcctagagtgctgggattacagtcgtgagccactgctcctggtgcgagtatctttcaaatctagacccaacggtatggcagacagtaaagaatcttatatttctttttcatgttgttattccagcacacattattagagtctaggatgaacagtttcaggtagtaggatgataatgttgtatctcatttttgtggccttcctcactgttttaataatcatgttagtgaccatttattgagtctcagcacagtgctaaatgctctccatatgtggtatcattcaatcctttcactttttatggatgagaagactgaggtttagagacctaccacattggtaggttaatgatacattcatcaaaagtaacaaccttgttaggaggagttgtttacagaggatatactagtactctttcagttttaactaaagcttccatttactgatagctcaattttgtgccattgccagtaaaaacaaattgatggctgacacctgtaatcccagcactttgggagttcgaggcgggaagatcacctgagcccaagagaccaacttgggcaacatagcaagaccctgtctctaccaaaaaaaaaaaaaaaaaaaaaagtagctgagcgtggtggcatgcacctgtagtcccagctacttgggaagctgaggtgggtgaattgtttttgagctcagaagttcacagatgagccatgatcgagccacggtactctagcctgggcaacagagtaaaaccctgtctcttaaaacaaaaaacgactatactgattttggtactggcctgggcaacatagcaagaccctgtgtctatttaagatgaaagcttttcaaattaaaaaaaaaaacaaacaaaaaataaatgcttgttacctgcttcctatctgattatcagaagactcggtttatttgttaagcaataatttggtaataggagttaaacctataaatagtggaaggagtccttagctgtgagtcgtctgttccattcgttgattctcattcattcagcaaatacttgagcgccttctacgtgccaggcactgttctagacactcggcataagttgttaaacaaaagaggccaagttgatgcctttatgaaactgtttctaggccaatgaggcagtcaattaaaagagttaatatctatagctatctcaatataaaatgttaattagaaacgctgtggagagtaacaccttgggatagaggggatagggtgtgtcaggaatgggtggggtgggagcaggggaggtcttcatataaggtgttaaggggaaccctctggtgacaacacatgtgatctgagacctgaagtctcagatgagggaggaagccatcatggatctggtgcaagagtattctgggcagagaaagcagcaagcacaaaggaccaaggcagcagaatgccaggtgagcagggggcttagcaaaccagagagtaggagatgggtcggatcatgtagggtctcattggcctttggaagtactttaaaataccctgactgagatggagagccacttggctgtatacctgccatttactgccccagattcacttggcccttttctagcctgctctgtagatgtgccccaggagggggccctgcactgacaggttgccttgctttatggctgcgggccatgggaagtattgctgggggtgaccgagaaggagaagaatgagaccactgtatttcttccctcctgcaggcttgtgtggggtggggtttccttagacttaaggtcacatttcctgtcatgtgccttctctgcggagctctttgtctccctccctctccatccttcacaccttcaggtctatgaggagttcaggtacccctgatttaccagctccagatactgcattttctcttgtggtttccctacacctgcccacatctttgtaaatagttcctttataaactctcctcaaatcacccactttgtgccatctgtttcctgccaggacttagactgatccatgatcagagagttttgagcaggggagtgacacagtctgactagcattttaacaggctcatttaggttactgtcaagagtagatggtggggagtgagggtggatacagggaaaccagttaggaggctattgcagtatcctgggagagaggtgacggtggcttagctcacagtgacggtagtggaggtaatgagaaatggtcagctctggatatttttatgaaggtctctaccttgctaagctgttttgttaatgcagatgcagggagggcctttcatgacactagagaacaagacatggttgtattgttagtgcctgccttccttattgtgccatctggaatcatcccattgcagacactctgattcaggccagtaggttaatactgatagtctcagaggtagcagccttgccaaaaacaggtgtttacaaaagatactactgtttttctttgagtttgtctttgaacagaggcaaacgcgtcctccactttaaatggcatggtgtcattgaaccattggcatggttcattgtcaatgaagtgacttgaactctgaggggaatataagagaattattagtcttgatccctgccctcaaaattcttttatcttagagagataaaaaagaatatgctgtaaggccgagtgcggtggctcactcctgtaatcccagcactttgggaggctgaggctggcggatcactggaggtcaggagtttgagaccagcctagccaacatggtgaaacctcatctctactaaaaaaatacaaaaattagctaggcgtggtggtgtgcacctgtaataccagctactcaggacactgaggcaggtgaatctctttaacctgggaggcggaggttgcagtgagccgagattgcaccattgcactcaagcctgggtgacagagcaagactccatctcaaaaaagaaaaaaataagaagaatatgctataggcagtcacagagtgctaaattataactgctttgcacgaggattttggggagttgaaaagccatctgtgtgggctgaggtggtcaggatgacttcatggagaacgtggaactgggtgggctgtaaaaaatagagtttggggcagccattcaaggagggagagctgttttgagggaagactcaggcttgactgggggcgttaagatggcttaccaggaacggagggtgcaggttggatgtggtaggaaatgaggtgagctgggcgggtgggcccctatcagggtattaagaggcaggtgatgtgctggcttcaggttcgggcagtgggccaccacatatcctaaggagggaccagcggaacagaatcctgacctgctgttgacttatttcagcttataggatccaaaatattagtaaatggaggtggaacaaatcactaaatatgataaaacttcccaactttttatgcctctgatagaagggactggagctctgcttggttaggtggtcagtaggctagctttctgaatccattttattttattgaaattcagcatataccatattgcccawgtgtaaagtaatcctgcatatcaaaatttccccattaaaaagtccaaaaggttgtttttggtcaagttgaaaatacatgtacttttaggtatataagtgaaaaatacctgcttacaaaatttacatttaaatttgggtccatatacctacttaaaatcacctactttataaagtaacactaatttagaaatgctggttttcctcctcttcttatttataaaatgtttcttttcagactcttcacatgcatctttgacttcactatttttatcatcactggagccactttttgagtcagccaatgtggatttccggaccacatgttcagttcttgagatacatcgtttttgaatatgaataaggtgttaccactgaacagtttattccaagttacaagtatccacttgcataacattagactttttttttaagaaagggtctcactttgtcgcccaggctggagtgcggtgatgcaatcaccactcactgtagccttgacctcacaggcctgccttggcctaccaaagtgttgggattacagacgtgagcctagaattttttttttgcagtgtttccagttggtatatatttgtggtcactgcaacttaaccactttattactttttcaaatgatttctatttttttttaaagacagggtctcactctgtttcccaggctggagtgcagtggcatgatcatggctcactgtagcaactttccaggctcaagtgatccttccacctcagcctcttgactagctggaactactggcgtgcgctaccatgttcggctactttttatatttttttgtagagacagggtttccctgtgttgcccaggctggtcccgaactcgagctatccgcccaccttggactcccaaagtacaggcatgagccaccgcgcccagctaaaatgatctttaaaacgttggtctactggccaggcatggtgactgatgcctgtaatcctggcactttggaaggccaagtgggtggatagcttgagcccacaaattcgagacagcctgggcaacagggtgagactccatctctaaaaaaagtaaaaaatgaataaacaaaataaaaagctggccttacaatggcagtttacacatggaagtgtgagtttatatctccagggataattactaaatttgtgtttaatttatcttgtttcactgattaccattagccaaagcagccttaactgaggttgttttagggtattgtgtcatccccagctggtactttgtattcaaaataaggaaattgcaaaacttcctacagcaagaggtactttgtaagtatttgaatataaagtgacttgtattttctgagagagaattttttttgaaaagtcttgccttatatttcatatattaaatgactcttctactgcagcttcaatgacatgaatcttaggcagcaaatctactttctgaaacattctgtctctgggagaggagggagatataggaagcagagaagtgatagtgcctggtatgaaagttggtgcctcatgagattggctttagatagaagctgtgaaagagaaagtgccaaatgcattagttgttgtttaccacttactgaatggaaactattctctgcttttattgattggatttctttttttttttctttttttatttttattttttttgagacagagtttcgctcttgtcgcccaggctggagtgcagtggtgcgatctccactcaccgtaacctccgcctcctgggttcaagcgattctcctgcctcaggctcccaagtacctgggattacaggcatgtgctaccacacccggctaatttttgtattttagtagaggtggggttttaccatgttgaccaggctggtctcaaactcctgacctcaaatgatccacccgcttccacctcccaaagtgctgggattacaggcgtgaggtaccatgcctggcctagtgattggatttctattgattaaatgaaaaactccatgaaataccttttaaacagagctgtccagaatgcaggcatttggttagctcttcatttatttattgccatggcacctaagtgttggggaccctagtacagttacttgatccctggcccctagagtctaacacaatctctccattactgaacaatacaaactaatatacatatagttatgtatcacttaacagtagaaatacattgtcagtaggaaatttccttgtcatgtgaacatcatagagtgtacttaacacaaatgtagatggcatagcctactacacacctaggctatatggtatagcttgttgctcctaggctacaggctacaaacctacacagtatgttactgtactaaatactgcaggcaattggaacacaatggtaaatatttttgtatctaaacatatgtaaatatagaaaaggtaaagtaaaaatatgttataaaagataaaaaatgatagacctatctagggaacttagcatgaatggagcttgtgggcctggaagttgctctgggtgagtgagtgaatgagtggtgaatgaatgtgaagccctaggatatgagtgtacactactgtagactttataaacactgtacacttgttactgagcagacattatgaaaaataaaaataaacacggtatgcttaagctacactaaatttattcatacgcttttttctttcaataataaattaaacctagcttactgtaaattatttacttcatgaacttaaaaaatttttttacagctttttgacccttttgtaataacagtttaaaacacaagcacattgtactgctgtacaaaaatattttctgtatatttttattctgtaagctgttttctactttaaattttttaactttctttttaccttttaaacttctttgttaaaaaccaagacacaaacgcacacattagcctggacctagacagggtcaggatcatcagtgtcactgccttccatctccacatttcatcccactggaaggccttcggggacagtgataggcatggagctgtcatctcctaggataacagtgcgttcttcaggaattcctcctgaaggacctgcctcaagctgttttatagttaattttttaaataagtagagttacactctaaaataataatatatagtatagtaaacatgtgaattagtaatgtagttgtttattatcattatcaagtgttatgtactgtacataattgtatgtgttatacttttataacactgacagtgcagtaggtttatttacaccagcatcaccacaggcatgtgagtaatgctttgtgctacaacatcatgaaagctgtgttactaggctgtagggatttttcagctccatcatagtcttaacgggactgccgtggaatatggggtacgttcttgaccaaaacatccttatgtggcacattactatattagtttatatcatatatgtgtgtatagtttataagttgatacatacttagtttatattatatattttaaagatatatgtgtatattatatatgtatatattttatatatatacatgtgtgcatataagtgtatgtatgtatatgtacgtatgtatgtatgtatgtatgtataaagcctgaccagcaaacttgaaaacattctgtacacagaaacacctagcctggggctgggtgcaatggctcatatctgtaatctctgcactttgggaggctgaggcacgcgaatctcctgaggttgagaccagcctggccaacttggtcaaaccctatctctactaaaaatacaaaaattagccaggcctggtggcaggcacctgtagtcccagctactcaggaggctgaggcaggagaatcgcttgaacctgagaggtggaggttgcagtgagctgagatcatgctattgcactccagcctgcatgacaagagcaaaactctgtctcaaaaaaaaaaaaaaaaagaaaaaagaaaagaaacaaccaagcctgggctgggcaccgtggctcatgcccgtgatcccagcactttgggaggctgaggcaggaggactgcttgaagccaggaatttgagaccagcctgtgcaacatggtgaggcccatctctattataagaaagaaagaaagacagagaggggagagaaagtaagaaagaaaagaaaagaaacatctagcctgtgccctgtcaggagcaggggtaaactcaactcttgggttccctttttgccatatcgtgagtgatcagttgcctcatgattagagaaggtgagagaggtactgttaggcttaacatttgttaggttatacattaaataatgggagagctggccttggaacctaacagttaggtataacattgtgttgatgggaaaacaaataaggtctaaaaaccaatgaactttgagaacacagcttctgcgtatgttgtggcctgcctatctaagtaggtgtaggggatgaggtatcacaaaactaagcactttgaaatccttttcctttatttttctaagaaatttatggttaacaaaagtataataatgtaattaagagccatttttctataactgagaattaacatttgctaacatctttttttttttttttttttttgcttctggttatttgtttaaaggaaaagcaattagaaatatagccaaagcctcctttaaccctatccccagttcagtgtgcctgccacccttcccagaagcagcccttatcataagttgtgtgtgcatccttccacttcacttttaatccttttatgcattcataaacaactggatttgtgtttttaaaaattcacataaattgtcacactgtcattttgccttttttcatttcacagtaaaaaaaaaaatagaaacagagtcttgcttgatcagttggagtcttgtcagatttctctgatggtcgtaattttggaaagacaatctccctttagaattgtgagagggtcctgaattctgctaagatgtaggtgtaaaggataaccagcgattattccggaggtcacaagatttagagctttctcaattactcctgtagataacatcccaattgcagaacctaagattggctgtttgagatgtcttttcagatttttgcatttctgactggctgactccacacagacaggtcctgtggccccacccacaggctgactcagtgccggaggaccatcttccttccacatccctatgatttcatccccaaccagtcaacattcccattccctaaccccctgcccaccaaactatccttgaaaaacctccaaacctttgggaaaattgatttgagtaataactctgtctccagtgtggtgttgccagctgcatgtcagttaaagtcattctttattgcaaggctgtggtcttagtgaattgattgtgtctgtgcagcaagcyggaagaacccgttgggcggttacaaaatgagtaaatctcaaagaggtggcatagacttcaggtttaactacagtgttcaactgaaacaaagaaggatgttggggaggcccggaatggggaggtgaccgggaaaagcacagtaaacaaggataaggtttgttatgcaggtttaggcaggtgccttctccattggtaagagttcctagtggcttagagtcatccttgtctccctggtacagaaagagaggcaaatggagatttccttttatagatgtaattttcccttacaaatgaggtaacttctactctgttttcagagcttttcctttgtctgctgtttctcaaaataatcagctcaaagtaatccttatgccaaagaagcctatcgtgggaagacatattctggtctcctacagtcatgttttgaggtggcatattctggtctcctgcacattcaaaatgttaggttatttagagaatttttgtttgttaaacatttaaaaggtttgttatctttgtttatcctttactagttgagaagaaaagtacgttactgtttttaaattatgaatgaagaaagtactatttgaggtaaaactttgcgcatcaacctctgagctgaaatttagtgactattgccactactaaaaatcttgttttatcaaaccttcaacctaaattaacagacagaggctctctaaaagaacatgacacttatttgggaatagtgtattgcartgggaatctttgtgccacagtaaactatgtgcatattcaaggaggtaaaggaagacaaaggtttttcaaggaataatgaggattatataattcttttaagataattattattggctacaaggatcagtaacaagtgtgaccagtctgagattggacaggcaattgctggacagatgtccttgtggagatattttttgtgtaaggttgtgatgacctttgtgcaggattgtggtttttgcagagtcatttgggatagtttttgttaatcaggcattgatgcatgagaaccctctcttcatagctgtccctggctttatttgtcaggatttttaaacacaagtgactccattttgattttgacagtgttcacaaatgttagcattgcatcagaatccactggaggacttgttaaaagaagttgggtggaccccaccagctaagtgaatctataggtctatactgagaatacctgagaatttacatttcaaacaagtttagcttagtttctggagaacctgtttcttgagtaagaggaatggtttctatgactcatagcagcattattcataatagccaaaaaatggaaacagccaaattgtccaccagctgataaactgctaaacgaaatgtgatagatctacacagtggaatattatttggtgaaataatatgaataaaaagaaaaggagtactggtacatgctacagcatagatgagctttgaaaacattatgtttgtgaaagaagccagccacaaaagaccacagcttttatgattccatttatatacaattccaaacaggtaaatttatagagatagaaagtaaattagtggaccaggcatggtggctcatgcctgtaatcccagcactttgggaggccaaggcttatggatcacttgaggtcaggagtttgagactaacctggccagcatggcgaaacccatctctactaaaaatacaaaaaattagccaggcatggtggtgggtgcctgtaatcccagctacttagcaggctgaggcaggagaatcgtttgaacctgggaggcagaggttgcaatgagccaagatcgcagcactgcactcaagcctgggcaacagagtgagactccatctcaaaaacaaagaaagtaaattagtggttagcagtggggagaatgataaactggatttgatgcttaagaggtggggggttacttttcaggggagtgaaatgttctaaaattgattgtgatggatgcacaaatctatgaatatgctagaagtcattgatttgtgcagtttaaatgagtgagttgaatggtatatgaattatatctcaataaagctgttaaaaaaatacaccagttcttagttctccatgggacctgttaagaaaaaaaagagaaatataccagaatatactagttcttaaaagaaaattattcattgttatgaacagctgacctgtaatacacagatagtcatcagaattcataacttgacttttcagatatgagttagttactaactgcattggaaaatcacttgttcattctgaagaaatrattaggaactccaaagagaaggacactatgttgggaaaattttaagcattttccacccttgtggtatgacatatttccatgtttttgtcaggtgtcttagcttagaaataaacctccatttttcttgcgttgtacttggctgctttcccgcaagaaagctgaagatgggacttctgattaaggagttcctggctgggagctttccttcctagacatctaagtgccagaatgccaaggggaagatgggttcatgcattagcctttgaatattattaagtcgtatggatttgaataggcttgtactggggtaaaggaagtgaattttcttcccacttgattttgtgtcattcagaattcattaactcacttagataaaacagtacagttggtcttccatatccgtgggttctgcatctgtggattcagccaaccacagatcaaaaatatttggaaaaaagattgtgtctgtactgaataagtacagacttattttcttgttattatgtcaatctaaaaggaagaagctcaggcaaagttaatgtaagtagagagtttatttgggccaagcttgaagattgcaacccaagagcatagattcaagttgccctgaatatacactctaattagcagcagttacaagtaggtttttaaaggacaagaatagttacccagggccaggtgaggtggctcacgcccgtaatcccagcactttgggaggctgagaccggcagatcacgaggtcaggagatygagaccatcctggctaacatggtgaaaccccttctctactaaaaatagaaaaaattagctgggagtggtggcacactcctgtagtcccagctactcgggaggctgaggcagaagaatcacttgaacccaggaggtggaggttgcagtgagctgagatcgcaccactgccctccagcctggcagagccagactccgtctcaaaaaaaaaaaaaaaaaaaaaaaaaagaatagttacccaaaaagctggctgaaagaaaagcaaaagaaaagaagaggcgattcctaaattgtttaccaagactctacactaaaattacataaggtatacattattctttgtatcacaaattccaggaacatgaagataatggatgaggcagctagggaggaatgaaatgcctttaaacaactgcccccggacatgggtgttgggagcataaatgaagtcctatacttggtctctctgggcctgataaattttgcatacctcacataactcagactgctctgagctatttttcttttctcgattgcagttacattgtactaggaggtattataagtaatctagagatgatttaaaatacaggcgtgcactatataacaatcaacagactacatataccacagtggtctggaaagattatagtactgtattttcactctaccttttctgtgtttagatacttttagatatacaaaggcttactattgtgttacatttgcctacagtattcagtacagtaatatgctgtacaggtctgtggcccaggagcagtaggccacactatacagcctatgcgtgtggtaggctataccacccaggttggtgtgagtatactctgatgttcccaccatgatgaaatcacctaagaaggcgtctctcagaatgtatccctgtagttaagctactcgtgattatatgggagggttgtataggttttgtgtaaatactccagcattttatatcaaggacttgagcatccacagattttgatatcctgggagatcctggaaccaatcccgcatggatactgagggatgatggtatatcataggcaaatctttatttaatgatcttaccaatttcttatatatttttctatcccattcagcttatacgcatgactgagaaatgcagtctgtgtttcatttaggctggtgctttattttagctgcatgagtgtcaggaatggaaaaagaattatgattctgggacaactttcttattcctcccaagtcggattctcatggtgacgtcagtctgttttttgaagtattataaccttttaaacagatcatccttcaaattcatgttcaaaagcaaatatcaaagcgtattctaaaaccagatgtaaattaattttagattggctgccatcgtagatgattcatatcactgctcccctcatcatcacagataattctttcatgcttctcaaagggactaggagctctacctcaatgggtatttcggaaataaatgactcaattttgaagtttcccagggagatttttatgtatcttgaaatctcaaaaaaaaacatgtctcactacaaagattaggaatgccaaggaaggtgaacgccaatcctgttaaccagacgctccctcattactataccttgtatacaggagctctcccatgagaccacattgtgtccacaaccattgcctgatgcactcagcaagtcaatacaccaaggggttggctgggcgtggtggctcacgcctgtaatcccagcactttgggaggccgaggcaggtagatcacctgaggtcaggagttcgagaccagcctggccaacatggtgaaacctcatctctactaaaactacaaaaattagctgggcggggtggtgggcacctgtaatcctagctacttgggaggctgaggcaggagaatcacttgaacccaggaggtggaggttgcggtgagccgagatcatgccactacactccagcctggatgacagagactccgtctcaaaaaaataataataataaaataaaaaaaaagaaagaccggggttgcagcagagaaggaggtttagtcatagggtcacctgatgaggagatgggaagaatcctcaaatccctccttgaggaatttggggttagggcttttaagggttttggagtgggctgaagtgcggagtgaggagtttgttgattgattgaaaagtgtagggtgaagtcattgacagggagataaggaagctgtattctcaggcagatcctgttcctttgtgggggttttcaaactgattgctggacttcaaagtctgaaaaacatcttagatgatccttaaacaaaagtcttatgattctaatgtcagagatcctggctctgtaggaatgatgggatacaaatggtcagacgtttagcaaccaggaagtgggctgaagtgcagcctgattcatgcttaattataactgtatttctgtccagaacccagcacgcaatttttgtcaaccatgtggggcggttttagcattatggtgtggtcttcagaagagaaagatctgatttcttttgtgacctgactttctgagatccttcattttatgggactgtggagtcctgtgtgtgacgtaggaccagaatttgctatttgttttggtgtttcaacaattgatgttgttataaatctcccagatgattttaatattttaactgttcagttttacaataagaagcatgactgtaggcagaaactaattatgtatttgagagtggtgagttaatgaacatccaaacaacttcatagagcaggaagaatacatatttcaagtggaggggagaaaaaaaatcattttccctctacccttctaatttctgggttggaaccactataacaaaccaacagggtaacaaaagaaaaacaagcagaagtttgttaacatgtatgcttcatgtatacataggagatacccaggggaaaatgagtaattctgaaagaggtgatctagaactccagcttctaaagcattttcaactaaaaacagagaagattgtgggcgaagccagttatggggaggtgaacaggacaagtatggtaaataagagtaatgtttgttatgcagatttcagtaggtgccttctccattgataatagtttcctctgatttagtcatccttctcttttggtacggagagggaaacactctcacaagtggagatttcctttatagatgtcaatttccctcaaaaactggtatactctgttttcagagtttctcctgtagctgcagtttctcaaaataatccttatgctgttgaggcatattttggggtggcatatgctctcccacacaagcaagagacatctgtcttcatctgctcccagagtaactggtgccagggaaccaaacaccaaaactgccattagtttggatattatggatttggtttctggaaaagtccattgtgatgccagcatggtacaggggattccctctcgccttgtcctaagcctgtcatcctgcagaacccrtcttacagtactgtgaagttccagaccataccaaccaaccctcgccaataggcatttgtggcaataggaagaaaaagctgatggaggtctcatctgtatttgttttctctctcctatctcctgcatccttaccaggcaaaagtagaagaaaagatccaagaggtcttcagttcttacaagttcaaccaccttgtaccaaggtaagctgtggttaggagtttgaggggatctgggagaacaccaccatgcagcagcctttcttctttcctccttgagcgaatctaaccacggggagcatctgctgcaagaatggtgtttcttgtccttgtggttacctggatatgctaagaccccnactcctccctctggtagaatactgtttagagcgattctccactcgagctgagctgccaggtgttacatggggattcccctcaatgcctcaattctgaggtctgaagatggagagaggaattccaggtttttgtttagtggtggcctgctgctctggtcttcagatgagaactctcaggtttttctttttctttctttttctttttttttttgagacagcgtttcgctcttgttgcccaggctggggtgcagtggcacaatctcggctctctggaaccttcgcctcataggttcaagtgattctcctgcctcagcctctcaagaagctgggattacaggcacccaccaccacactcggctaatttttgtatttttagtagagacagggtttcaccgtgttggccagtcttgtcttaaactcctgacttcaggtgatccacccgcctcagcctcccaaagtgctgggattacaggcgtgagccactgtgcccggcccagatttttctttttcatattgtactttgaaacatttagagtccagggagatggcaagggatggattattatttgactggaaaaacatgggaagtttgagtttctccatgcctactccctgttggtaattgtgttccatatcccaaggatgaaatttcaaacaagaaatagaatgccttttgttttccttggagcttagcaagttgaagtcttctaagtcctgtgaggtcaggtattttgaaaagggaattataggaaaaaatttattatttaatttgaacctttattttctcttccagtgttttgtaatatgtcacactagaatttcataaggttatttcattcttgtattagtacttctcatgcagtcagagtctttttttgaaaccattatttgttatatttccagccatcagaattgatcagtagcctaaaactgtgtggtcaccattttatcttaatgatggaacactttctcttcctttcttttctttctttctttctttctttctttctttctttctttctttctttctttctttctttctttctttctctctctctctctctttctctttctttctctcctctctctttctctctccctctctctttctgtctctgtctttctcactttctttcctttctgtctgtcttgtcttgtcctgtcctgtccggtcctgccctgccctgccctgtcttgccctgtcttgctctgttgcccaggctggagtgcagtgccctgatcatagcccacagcagccttgaattcctgcgaatcctttcagtgcagcctccgcagtagctgggactatgggaacacatcactatgcctagcttattttatttttgtttttattttttgtagagatgggggtctcactgtgttgctcaggcttgtcttgagctcctggcctcaagcagtcctcccaaagtgctgagattacagctgtgagccatggcacctggccgagagaacacttttccttgacatctctgaacaaagtgtggttaggtcactggctgattcactctggctgggaagttgcaggtctgaagttcagcctttcctccttcatcatgtctcttgacttcttgagatcttctaacagactaaatcctagcaagtcagtctctaggtacttctgcttactggaacattataaataggtccagctttgtttgttacctttgtgtctttttttttttttttttgccaccatttccttaagaaactttttctgattagccatggcagaaaacagttggaaaaggcaagtgttcataaggaaagacaggtgggagggttaacttcatctttgttccctggggaaggaaaggaggaaaaatatcagcttactagtatagtctttcccttaactgctaaaccaaatctctgcattaacccaatgctctgacctcaataaaatgaattattcctcttgtcatgagatacagctagagattagcaaatgacgccatttatttaaatagcttgggagaacgagctctcttaaatataatggtatccttggcagttcgctgcccctaggcacaagctggttcaagcttagcctccccagaggggacaagacttcataatggtgagggtgtgggtgattgcttttggaggggctttgttgttgtggttgtacccccgatgactcacccgatcgggctgagtcactgtccactgcctgggctctggggacacacagcctctgtttctcacatgaacctttgattatttgacattcccttttcacttaccatcaggatagagcccttggtctctttcattccttttttaaaatttgtttttccttagctcatgagctgaagaaagacttttattcacactgagatatgagggaaaatgggaggttatagtctgggaggaagcagttgttttttgagagtggtggtagatgatattaaaggagtgaaatcccctgattcatagctggtaggtcaagtatgggtgggaaaaaaaaagtgttcctcctgggctcggatccttgtggaaatagaatatatcagggctctgggttagtttcaggaatttcacaattacccgtttttatcattgttgcctatgaaattgagtgttttaaaggatgctaattaatattggagatactatacattttggctgaatggctgagtatataattcaacatatcaatataaggctgaagscaaacatcaccatcatagaataagcgaggatataagaataaattagaaaatttatcagaattttaaatcattatcacagtctcaatatttaacatattaatagtcaaaatttaaaagtctgacactttaatacaggaagtaaccttcactgttagctgaagtgcatggttagctgttagcagtaaatctagatggcagggcttgtttgtgtgtctgaggtcatgatgctgatcaaatgggacagactcacacacatgcccaggaccacagaccacgcacaggtccagggatgcctgtgatgatgctgaagtaggcatttgcctattcagtgttccagggccaaagctgaatagcagactgggctgaaagtcaagcctggagctgaatgtcagtacattctatacttaatccccttcccagaaatgattttcttctctaaggttgggactgtctacctggagtgaggtagtcagtcccaaggagctttttgaccatgcttttcatggttttgtttattcatgtctgctttcccatgaaaattcattttttcttccctgtgggtattgtcacggtttcacacccttttgaatgtacccttttgcatttatcaccttggctttaataagaaacctgaaatgcataaactacacagatacctcgctcacatgtagtttttaaatttgttttctcctgggcaaggagacgggtgctcctcagaagtgagaaatattgataatgtccctgtgctaatagagccctggaggttaagtgctgacaatggctctgaagccagaatactctgagttaaagtcctcaaagcaggtctctcacaggcaccagcttagctcccgtgttttctactattcctgtatgtgatacaattttagaatttcccagatcctgagcaggtagaggatgtattcccttcttactgttgttctttccaaggtctcacaaataagttcacctttcctcgattgctttattgcttacatgccaggtgcttattttttgactagagaggcccctggctttagtgagtttagaaagtccccaggaaccagcaatggactgaatcccctgtcctctcatctgtcacaatcaaatgcatgttttccaggatggcccaggtttsgggggaggaagtggctttgctctcattccattctgctgcctttgtgtgatcctctctttcagcagcagtatctagagagtctccaaaggacaggacactctgctgggctcagggaagccagagtgagcaaggctagccctgggcctgcccctgctgggctcttggtctagtgggggaggtggacattaaacaaatgaacacaaatatacagttaccgatgggataatttgagagagagaatcactgggagaatctaatttggattgggaagttagggaaggcttcttacagaaagtgacatttaagctgaatctgtaggtggaataggggtggctaacttaaaggatggggagagtgttccaggcagagggaacagcatgtgctaaagccaggagactgaraggagcggagctcaaagaaggcagcatgaccagagctcaggggcggagatgaggttggagagtagtgtgggtggaggcacattgtgaagagtctggaagcccagtgggctcacccctcataagaaattmtatttaaatcattacccagtacacatagatgtgtaagttccttctcagacagtggaaacctgacttcccatagccttaatagatttacccacttgctctcctgtcaccctctgcacagtgagacgggggccctcctcatccacttgagctgacagcctgcatcccaccctgcaccccctcaagtcctgcacgaaacctgtcttattctgctccatgtaattgaatggttttggggctgaattgttcaggtaaaaataggaagagctctaccttttctttcttaacttcctacacagaaaagatttttggatagaggtgagttgagaatgaaggaccggtgagggtattagtcagcttgggctgccataagacggtatcacagatggggtgcattaaaccacagagatttattttttcacatttctggaggccagaagtctaagaccaaggtgtcagcaggcttggtttctcctgaggctgctgactggcttcaccaacatgttatatttcttaatttcactggcgcttcactaactgccttataatccttttattcgtctcatgtagattccctaacacacccaccaccgtggccactccacagctctcccaccatcttgactcctagttcctgagaaaatcgaggctgacccacctgactttcctgtttccttcttcccacatcagagacctatatttcgctagcttcgtacccatcatttctcgctcaaagaatgcagcatccttccttattccaggctcacctctcctactataccctcatcccagccctcctccatcctctttacagaccttccctatggatttcctctgagcttttgcatttctaatgtggaatttctctgcttactgccttgtacttttgatccagctgaactaaactaactcaaatgtgtcatggtgttttcttcattttgcctgcttaactcatgtctttccagccttaaactcaatgctcttccctttgggaagagttttctgaccctccatctcttcccgtggctgatcacagcgtttattggacagggctctgcttgtcattttcacatgtgtgtccacctctggactgtcgctctagggtacagagcagcctctaccccagtgctggacaacactctgcccacacagatgggtgctccctgcgtcctgagtggactttcctgaaagagaaactgagtctggccttctcttgtttacaatttgccttcacctctgctctgaatgctcttggaggtctctagcccttctgtggtttgttgtcttttcccctcagtcttgctgcagcatctgccactgttaaacaccttcctgaaattctctcctccctgatggcctgtgacatgacacttcctttgctcttccctagcatatgtaaactctcctgtttctctccttcactggctcctccaaacccttagagatgggtcttcccacagttttgtttccaaacttctctctctgccctctcaccttctgtggcttcacctgtcacttgtgtgcagacaaatgcttcgtagtctgtgtgtgtaacctgaatccctctcctgagcctcacgtgtgtgtccagcagcctgattgacatcatcacctgaatgcagtcccagcatcctaagacccacacatccaaaagtcagctgatcacgggtcacacactagttcgggccctaagtagccccaactgggtcagctcctcagagcttctaaccctgtctccccaccccatctgtctgcccactgcgatattttcagatacttcagtttgtaaacacatactgactacctactgtttctccaaagcacagttctgatcatttctttcctcatctcaaaaaccttcaggacttccctttgcctagtaaattgagtagaaatgccttagtcagcatcccagatccttgtttttttgtttgtttgtttgtttttaaactggggcagtactcctgctttcctcccattcctctttcatccctgyattgaggtcagattctcccacctgtcactcctcttgtacacttgatacctgtgcagcatagtagagtagccattagccacctgcagctatttaaacttgaattaaaattgaattaaaattttctccttctgccagggccactcatcgcacattcctcctttttcacacaaactttcctgatcattcctttcttcatgagatatcccctcccttttgagcctcagtagtatgtttttcccttgcaaaacctacccattctttccttgtagccattgatatacttacctcatttctgaattggaagagtttttgaggtaaagactacatgaagggctgggtgcggtggctcacgcctgtaatcccagcattttgggaggccaaggcaggggattacctgaggtcaggagttcaagaccagcctgggcaacatggtgaaacccccgtctccactaaaaatacaaaaattagctgggtgtggtggcacgtgcctgtaatcccagctactcaggtggctgaggcaggagaatagcttgaacccaagaggtggaggttgcagtaagctgaaatcacaccactgcactccagcctgggtgacagagcgagactccgtctcaggaaaaaaaaaaaaaaaaaaaaagactgcatgaaggctcttactctgagccaagtacagtgggaatttgataaacaattgtggaattgactacctagcaaagggaatggttctctttcctttgtttctgtaatctgcaagcacggggaacatcttgacaatctgtgctttttgtttccttccctagtcacacaggctcttctgccagaccaagaaagaagtgcagcctctgtgctttgcccggcctgtgcaggtggccatgggcggcacattccatcttaaagccagtattgctgacttgaaagccaaggacagcgactggctgcagaacacggtcctctggccagggctgtgggtcacacgtgggaggtggaatttcagggagagaataatagttggataaccgagaggcaggcagggagtaaattatgggccttggagaagtcatcccagacggggtgactgaaatgacagcggctgaggcagggaagtggcgaggctcagatttaaattgcttataggatggggaggcacaaagatatctgttcttagatgctggaggaagtttctgggtggactgtcattgcctggctgcgtgtgctcattgcggcttttccgttagcccaaagtcactgcctttaggagacaatcgcactctaaatgtcagctggcatggttttcagatgctttagagacattcagacaagagcttcttttctctggtttagttgctctttggaaccagagaagttgctggttatccagtcagtgattgcagggggacgtcctgaagctgagtgtntacccgtgtgtgtgtacgtgcayatacgtgtgtatggtggaagcataagctattagaatgggcttataaactgtttgtctttccaggcttgttttgcagagggagaagcacttccattatctgaaaagaggccttcgacaactgacagatgcctatgaggtaaacacattacccaggaactcttgctgtcaaattatccaccaaatcctcctcctttttctatttaaacgtaaaagactgttggggctgacctgttgcagagtcactctttgttctctgtggctctggcaggaggtagggtgctgtcacagagctgggactcagccctgaaagggcagaacctagtctcttccagagtgagtggagcaccctagataggatggggctttcttctgttactagatgatgactaaggggttcacgtgctttatctagacctccttgacagctggctaaatgccagttacctgttcacccttaaccctttgccctataagctgatctaatttctcgctcatttattgaggactattgtccaaacctgttaagtctgtatcgtgatggttacaaattttccaacttcaccactccttctagtaagtacattacttttcatatcttcattaaagagacaaaaaaccctttcttgtaataagatctaatttctatactgactagaggaccagtatagagagtggtccttgcaatttaacattactgtttaagagtagatctttaatatttcccagagcaacgtcaggactgggtgacggtggaggggacagatgttggatgggactgagcggcaggcaaagggtgaatgtgaacaggaagtctccagtctttctgccctgcttaacacagagcagcatctctatttttaatctgctttttatttgggttccacatttgattatttgtggcaatgatttgccaactcaaatgcctgtagggcccaggcaggcagcataaatcagtgaagtgggctgcatggagactgaggctaactggagaccctgtgcccttaacttctttcctgcccattactgccatctgggaatgcagacccagggttgccaaatcatctttgtttccttttttttttttcttcctccaaatgaagccggaaatcacgttttcatgtgactctcctgacaaatgttgcagctactaccagttaaacaatacacatccatgggctagatttggcctgtgggctatgaattttcaatccttgactcaagtcctcaatagttatgytacagttggtaccatatcagctaacaatttattgaacagtgtgctgaaagcttaccatgcattctctcataatttatgagatggagtctcgctgtatttcccaggctggagtgcagtggcatgatcgtgagtcactgcaacctccgcctcaggttcaagcgattctcttgcctcagccttctgagtggccaggattacaggtgtgcaccatcacgcctggctaatttttgtatttttagtagagacagggtttcaccatattggccaggctggtctcgagctcctgacctcaagtgatccacctgcctcagcctcctgaggctctggggttacaggcgtgagctactgcrcccagttgcattctcttatttaaatcttgtaactacrtgaggtagatcaatctcttgttttttgcagataatgaaatgggcatagtaaaattaagtcatttgctcaaaggcacatagcgagtaagatgaggagctgggattcaaacttaagctgcatccctggcagtgtcttcagtagctcaccagcctaccttccaggtggtgggttagccacagcttgggatatcagcatagttttgaagagagcagcttgggccaacggaaagaacactggattgactctaaaaacctaggttcttgtctcacctctgacatttgctatttttataatctgaaaaaggttaatctttggacctcatttatatattttaatttataaaactggggcagtactcctacctaccctgcctagccttgaatgctcaataatcatttatggtttaattaggatcaagagccgtctgcattttgcctttggaagcctttcctagctccccaggcagaattagtcagtctcttccacgtgctccctcaaaactctgttttcgtccattacagcatttctccaggtatatgtacacgtgttggttccagaaagacatgaggtaacttatatgtctgtccagtgctctcttcccctacaggtaaccacayacattctatatcccaagcatctcaagaacagaaaccagttcaggcatggtggctaatgcctgtaatctcagcactttgggaggctcaggcaggtgaattgcttcagcccaggagttcaagaccagcctgggcaacatagtgggatgctgtctctataaaaacttaaaaaattagccaggcatagtggtgtgtgcccgtagtcccagctacttaggaggctgaggtgggaggattgcttgagcccgggaggttgaggctgcagtgagctgagatcataccactgcactctagcctgggtgacagagcgagaccctgtctcaaaaaaataaacggtagaaaccaaattttattatcatccccccagtgtctaatacagtgcttggcacaagtagatactatcaaatatttgttgaatcagtgattgagttaagctaggaaatctcttcagagaatgtatatctccttggttctataccgagaaaatagcagcccctaacstcctggcctgtaggaagtcctctgctcagccttccttagatgcctgccagggagggatccactgggttcagggtcatcttttttttaatcctgttgtcttttttttcttttctttcttttttttttttgagacggagtcttgctctgtcgcctaggctggagtgcagtggtgccatctcggctcactgcaacctctgcctcccgggttcaagtgattctcctgcttcggcctcccaagtcgctgggattacaggcgcacatcactatgcccagctaatttttgtaattttaatagagacagggtttcgccatgttggccaggctggtcttgaactcctgaccttaaatgatccacccaccttggcctcccaaagtgctgggattacaggcatgaaccaccgcgcccagccttgttatcttttttttttttttttttttttttaacagatggtcatttcagctcctggctaaggccacaaagcaaagtgtcctttattcactgattgttgtttgagcaagggtgccctcctcccccttgccaggctgctgggagtgagacagatacagccttggcagcagtgtcttggagtgattgtgaataagggatgttttctctcctgtctctctcccagtgtctggatgccagccgcccatggctctgctattggatcctgcacagcttggaactgctagatgaacccatcccccagatagtggctacagagtgagtctgtctttgggaaatctggggtgttctctgaaattgtattttgagtttgggattttgttttgtttctgttttgtttgtttggaatggaaaaaaacagtgccacaaagaaatctttgctcttctcatgacctccggcaacttcctgaaactcctccactttagaaaactaatgtaagctggtgggtagaacaagactttgaacttccaagagaaggattctggtttcttctgtggccttttcttttggctcttgactctggtctttgagaaaagtcttaatcatcaactctgagagacaagattttgccagaaagtacagtatgcatttgaacagcttctgtggggaagcacgtgccagtccagtgaacaaaaatgcctttgcctttcctacgcacctctatagaagtacctccccgctcccggtgcttggagcgaccatgtagctcttgatgggactggatgtgttactggtgtggcatacaaatgccatgactctcagttttcctaaacctgatcgatgattagagatctaagcaactgagcttcttcccaagatccttgtacagatggcattcgtgatctggcatctcattcccagacactcatcaccatttatatattaaagaagaaaagactgatcatgactccagtcctagggatacctggaataagaaagggcagccaggaattggatccaagagatccactgagaggcagcatgggctctaggcagcatctcgaatttctcagcttcctctggtgctcttgaggtcgaagcatctgggatgagagacttctgagccaggtttgtttctccacagcacaaggaggcagctgtgctgggacacacagaggcctagccggggcccctctctggtcacagagcccctgcctcagtcacattgtcaggtcagaggaacagaactgcacattgtctcattcattctgtcttaacaataacctctcattcttgccttcctgggcagggtgtcttgtgatgaatgtggatggggaagataataaagaattaggccattaacccttgtggtacgtaggatgctttctgagggagaggcaagtgcattgttttgatcatcgggatgccactgcaagcctggctgcttccagcactggaaggagagttggacacagtttctgcagtaacaggaatttaattgtcaaagaaaggcccacgtggttttttttttttttttttttgagacagagtttcactctgtcacccaggctggggtgcagtggcacagtctcagctcactgctgcctctgcttcccgggttcaagcgattctcctgcctcagcctcctgagtagctgggattacaggcacccaccaccgtgcccggctaatttttgtatttttagtagaggtaggctttcaccatattgaccaggctggtcttgaactcctgacctcagctgatctaccygcctcggcctcccaaagtgctgggataacaggtgtgagccaccacatccagcctcgtgtgtttttgaaataccagctcgggggcctggggattgtttgggaagttttcccttcactcctacacaatcaggatatttggaaagttttcccttcactcttgcacaatgggaaagttgggtgtgagagaagaaagaaaaaatggggatttctgtgagcctggatctgaacgctggatggaggaggccgcagacccatgaaaaactggaagagagaatcacagggggtgcctgaggtggaagaactcgagccaaaatcgactgagtttttttctaggctgtgtacttggtgttttatagtgaaggcttttctgaggaagtgtcagcgccgcttctggggcaatgtcacataggaagagaggagcctttaaagggcctttcattggaagcaatctaaattaaatatcaacagtagagaatgtttaaaaaaaattttttttaaatgtaaagctgggtgtggtggctcacgcctgtaatcccaagcactttgggaggttgaggtgggtggatcrcttgaggtcaggagtttgagaccagcctggccaacatggtgaaaccccatctctactaaaatacaaaaattagctgggcatggtggtgcatgcctgtcatcccagctactcgggaggctgaggcaggagaatcgcttgaacctaggaggcggaggttgcagtgagtcgagattgcgcctttgcactccagtccgggcaacagagtgacactccatctcaaaaaaataaataaataaaatacataaatttaaaaaataaaacataagtcatttatggtgcagtacattctgtgaaatactatataaccattaaaaaatgtataaatgtggccacgcatgatcacacctgtaaccccagcactttgggaggccacggtcagaggaccactggggcccaggaattcaagaccagtctgggcgacatagtgagactccatttcaaaaataaaaataaaaatagctgggcgtggtggtgcacacttctagttctagctgctcaggaggccgagacaggagttcaggggtttgaggctgcagtgagccatgatggcaccactgcattccagcctgggcaacagagcaagaccctgtctcaataaatatatgaatgtgtatatttgtatgttaaaatatatgtatttatatagagagatgtgaaatgaaaatagtttaaaagatttaatttacatacattaaaaatatagatgatgatatgcatagatagaaccagaaagatacatgtagtagttatttctggacgatggggttaaaagtgattttataaactttctgggctgggcacggtgtctcacacctgtaatcccagggcttggggaggccaaggtcggcagatcacctgagatcaagagttcgagaccagcctggccaacatggggaaatcttgtctctactaaaaatataaaaattagcctggcttggtggtgtatgcctgtaatcccagctactcgggagactaaggcaggagaattgcttgaatctgggaggtggacgttgcgacgagccaagatcatgccactctactccagcctggaggacagagtgagactctgtcttaaaaaaaaaaaaaaaaaaaggccaggcgcggtggctcacacctgtaatcccagcactttgggagaacgaagtgggtggatcacctgaggtcgggagtttgagaccagcctggccaacatggagaaaccccgtctctactaaaaatacaaaattagccaagcgtggtggcgcatgcctgtaatcctactcaggaggctgtttgtttgttttttgagacaagagtctccttctgttactgcactcccggctcctactcaggaggctgaggcaggagactcgcttgaaccygggaggcggaggttgcggtgagccaagattgcaccactgcactccagcctgggcaacaagagtgaaactccatctcaaaaaaagaaaaagaaaaagaagaactttctggctggatgtagtggctcatggctgtaatcccaggactttgagaggctgagacaggcggattacttgaggtcaggagttcgagaccagtctggccaacatggtgaaaccctgtctctactaaaaatacaaaaaatagccagatgtggtggctggcacctgtaatcccagctactcgggagactgaagcaggagaattgcttgaatccgggaggcagaggttgcagtgagccgagatcacaccactgcactccagcctgggtaacagaaggagactgttgtctcaaaaaacaaacaaacaaaacattttttttaagcttacttgcattttctgaagtttctacaatgatcttttattattttgtaattaaaaaaggaatggtttaaaaataagctgatttgtccttatttcaaaaaccacttgacagttaatgagagtttctgcttcacagatgccttaaaagctttacctgtggttcttctacgcattgatttagtgaacttttaaacatttcttagacttcccaataatgtattttgctttgtgcctaggagrtggttacttctaggtgcagaaaacacttgttatraacaaagcctactggctctgacccataaggaaatagattatttttagtaagatacagataaatcttaaggacttctatataaatagaagattttttttagactagctgaaatagaatattgcctttttatttatcttgcacagggaaatgaaatgctttgaaatgcgttcagttttctttcttcatacaaatatattaaggtgacctagagtcaaaaagtctagctctgcagttttattattttcctgccttcttttcccctgcatgtaacacacacgccccctacacttacacaaaggtttctctttcctattttgttcactgctgtgcttctatttgtttaggraacaatatgataagctgggttccctctagtggacaaaatacttttgtcagctgctatgaccgctgaccaaagccagcaaggcgaggttgttactgctggtatcagaggtttcaagaataatgtattcatagcctggaatgttttctttatttttggtagagacagtgccttgctgtgttgcctgggctggtctcaatctcctgggctcaattgatcctcctgccttagcctcccaaaacactgggattataggcgtgagccaccatgcccagtccataggtaggacttcagcttgcctcttttttttttgagagtctcgctctgttgcccagactggagtgcagtggcacgatcttggctcactgcaacctccacctcctgggttcaagcaattctcctgcctcggcctcccgagtagctgggactacaggcatacaggcgggagccaccacacccggctaatttttgtatttttagtagagattgggttttaccatgttggccaagttggtctcgaactcctgacctcaggtgatccacctgcctcagcctcccaaagtgctgggattacaggcatgagccaccgcgcccggccttttttttttttttttttgagacggagttttgctcttgttgccaggctgtagtgcagtggcatgatctcagctcactgcaacctccacctcccgggttcaagtgattctcctgcctcagcttcccaagtagctaggattacaggggtgtgccaccacgcccagctaatttttgtattttgtaaagacaggctttcaacatgttggccaggctggtcttgaactcctgacctcaggtgatacacccgtcttggcttcccaaagtgttgggattacagatgtgagccaccgcacccggcctagcttccctcttttaagaggttatatgcacacatttatatgtgtttayctaaaatgaattaatattttggaactagactaagtacatttgctttgcttaatggttttggcactgaaggaagcatcctctaatgagaatcccattctttgttactgaaagcagcttcagtgaaacagagcaaaataaaattcacagggagaccatcgcactgttaaagttatgtttttagcttctgtaagatttaaaaattgcctttaacttaaaaaccattttaggacatttcagcttgtaagatttttccaaagataaattcaaattttgctatttcagtgttttatcctttccctttcaaaaggttgttagtagcttatccccggaatagccccttaaatatttttccttttaatttttaagtctagtttgtatgtttccttacctttcagtgaggacaccatatctaggcctttgtctcctgggcatttttcctggccaggtgctgttggcacctggtgggtgcaggtcagaggtgctgctaaatatcctctacaggacggtccctgcaccaaagaattactgagccccagtgtcaacagttgagaaactctgctctaaagtagccaacttttttttcctttgaggcagtcttgctgtgtcccccaggctggagggcactggtgcaatctcagctcactgcaacttccaccttccgggttcaagcgattctcgtgcttcagcctcccaagcagctgggactacgggcgcatgccactatgcctggctaatttttgtatttttagtagagatggggtttcaccatgttggccaggctggtctcaaactcctggccttaagtgatccgcccacgtcggcctcccaaagtgctaggattataggcgtgagccactgcgcccggcctatagtagccaactttcgacctgaccattcttccagaacagcagccatccagagacttgccggtgcttgatgaagagtcaaataacacgtctgactctgtgagcagcagaggccacccggaatcaacaagagatgctgcccgtcttcacctgtccattgtcatattctacctagggaaggagatttcctcttcactatatcaagctgaagctgttttagttagtacgagaacaagcttgatgtgatgccagctcatgcatcttgcatttacatcccctcctaagccgttctgcccatggatgactgttcctatttccaaagctgtaatctttttttctgtttttttttttttaaacctgcccaattgtgcagaacatagctataatttttataacttatcctaggccttaagtctgtctatgatagcctagtctagtgctgaagttttttatgtaacctaaatacttcttgctacaaattagtctcagtttttacctactagaatgtttatgtaattatcctttgtatatttgaggtattttgctgggtagctttctcactgtgattgtctgtaatattaagctttttatattattttaaaaatagagataaggtctcgctgtattgcctaagctggtctcaaactcttggccttaagtgatcctcctgccttggcctcccaaagtctagggattacaggcacgagccaccacacccagccaaatacttaaaaaaaaaaaaagtagtcatttttacaactctcatgtgaattccctttgaggtggaaaatggaggctagagccagatacagttctgactaatactgcatttatgatgcttttaacaagcatttttattgttgttcttcacaactcgtggacccttattactggtcttttcctgctatgttcctagtcatttcccatattcatgtgccttacccatcccccacccctgccatctctaagcgtaattcttgctatttgtacctgttgcatttgttttattcttattggtttctgatttgttttgctgctcattttgtattatatgcttatttactgtacatgcctttgaatccttcatccaaactgatgacggtgtttagaatcaacattgattaattgattgagacagggtctcactctattgtctgggctggaatgcagtggcacaatcacagctcactgcaacctggacttccccaagctcaagtgatcctcccacctcagcctcctgagtagctggggctagaggtgggtgccaacgtgcctggttaatttttataattcttgtagagatggggttttgccatgttgcccaggctggccttgaactcctgagctcaagtgatscccctcacctcagccaaagtgctgggattacaggcatgagccaccacgcctggccagaatcaatcactttagatcagtcctcagccatcacctaagagtcccaagtaaactccttataaggctgagaggcaatcgctgatatccctgctttgaacttgaccctcttacaagatttacatactctttaatgatggaatgataaaagtggtggtgtccagcagaactttctgtgataatgaaaatgttctatattctgtaaatgtctataggtgtctataaacatctatacgtgttctatattggccactagccacagttagttgtggagtacttgaaatgtgtcttgtgtgactgaagagctgaattttctattttaattaattgagaatttaaattgcctcatgtggctagtggctgcctattggacagcacagatgtatctcattgctactcaaaatgtggtccccagaccaggagcattgctatcacctgggaacttattagaaatgaggactctcagccgggcatggtggctcacgcctgtaatcctagcactttgggaggccaaggcgggcggattgtctgagctcgggagttcgagaccagcctgggcaacacagtgaaaccctgactctactaaaaaatacaaaaattagctgggcgtggcggcatgcacctgtagtcccagctactcgggaggctgagggaggagaatcacttgaacccaggaggcagagcttgcagtgagctgagatcgctcaactgcactccagcctgggcgacagagggacactccatctcctaaaaaaaaaaaaaaagaggactctcagacccatctagttctactgaattagagctgcagtttagcaagatccacaggtaatttctatgcaactcaagtttgagaagcactgatacctggctgaacaytggaatcacgtggggagtttaaaaaaaatactgccacctgggtcccacccatagtgattccggtttaattggaattaggtgtggcttgggtgttgggatttttttaaaacaccccccaagtaattttagttgtgcagcaaggactagtgatggctcaagctttgcatgtatctgaatcacctgagaatttggtaaaaatacaaaggcccaggatcttttccacctcagcaggactgggtctctgtattcttttattagctttctacagattctgatgcacacattttgggtttgaagatccatgatrtagaagatagtttcccactttgctggtaattggcacgtaagctagaatgaaatgccttgctgacgttaaagaaaattgatgtattgcagctttcagtcatattctaaaggaatgattttgtgaatacttgtttttcacaaaatgtgccacttggtgtttgtacaatgttttttgcttgtaattttttatttattggtgaacttcttgtctctatgataagtttttctccccctacatttgtgggaaaaaaaaatatttttttgtagagctggggtctcactgtgttgcccaggctggtcttgaactactggcttcaagcaatcctcctgccttggcctcccaaagtactggaattacaggcacaagccactatgcctggctccttttttttgtttgtttgttttttttaaatatgtagaagtatcattaacattttggtcttcagaattgctaagaagtctgtgaatgacagctggtagttcatagtcaacttgccaattccttaaggtgcaagttggaaagccttgggatcagaatgttctgtaatacggaagtgtctgagatcaagagaagcccaacctccagttctctagcacagccccagacagtcagatgcagcatgtcagctgagggaggttggcatggagggatggtatcaaggtgtgtctggtacattcagatcctaactaattcgaggctttagggtcagtagtgttgcgttcggcacgattctatcttaggagctgggaaagggagtggataaccaggtgactctttttctttcttttaaaaaatgtgctgttaagttttgtatcagctaaaactttttgtggtacagaaaccttttggtatgctagtgcagccagcctttgttagggcatgagcttattaactatttgtttctgggaaatgtcataagaattgatgacgatttggaaagaaggaacaaattcaagttctctacagaaattaattgctgttaaaaatgtgtcacatgctgggcatgatggctcacacctgtgacctcagcactttgggagtccgaggtgggaggattgcttgagcccaggagttcaagactagcctgggcaacatggcgaaaccccatctttataaaaaatacaaaaactagccaggcgtggtggctcatgcctgtaattctagctacttgggaggctgaggtgggaggatagcttgagtctggggaggttgaggctgcagtgagccgtgattatgccgctgtcctgcagcctggccgacagagtaagaccctctctcaaaatcaaaaacaaaaaccatagtgccacataattgttttcaacttcagtttcaatccttgtgttttctacagtaaaattgtaggtgcaaaaagaagtatgtgttgttttaacctgtgacgtttcagaactcacagagcaaggcagcagcgtttgcttttgctttcyctgcccggataatgggaactctgaaatcgaaagcaattaaatgtgatgttggcaaacagttataaacttgtgtcttcttggagagtaggctatgtagtctttctggcagcagtagcaaggaaataatgaggtgaaagcgcccaggaaagaaggccccatgaacactgcaaagacagtttgcttgttgtaaatggaggtttctcctggcgggaaggctgtgaccctgctgagctgtggagaaacagcttgataaccagggctttcctggggcaccctttctggtgcacttcggaagaccccggactgatgatagggctctcttgatttcacctaaagcaagactgtaacctctgggcagcctgatgccaggcttggaggcaaaccctcagaaaacagctcccctcagtgagggaatgggagcctgtttgaattaacgtggagaattctccaagaacccgcagactgggaggcattctcacggcgagtcagtgcagctcctcttatgtttaccgcaattaaggtgagcatgagagcagcctgcctctcttctgttctcccagccatggaagcaggctccattaaaaatgtgtttttcagccggatgcagtggctcacacctgtaatcccagcacttgcagaggctgcggcgggtggatcacttgaggtcaggtagttcaagaccagcctggccagcatggtgaaaccttgtctgtactgaaaatacaaaaaattggctgggcgtgatggtgcacgcctgtaatcccagctacttggaagggtgaggcaaaagaatctcttgaacctgggagacggatgctgcaatgagctgagatcacaccactgcactgcagcctgggcgaccgagggcaaccccgcctcaaaaaaaaaaacaaaaaaacaaaacttgcttcttactggtggagtagaaatcagtggcccacagaggcttaggtggcaatgggagtgagaagacctctatttacatgttcatgataggcctaggtgatggatcctgactaggatggttagtgtggaaagaagcagttgagcaccatgttttggcaaaattcaaaggctgggaggttcccaaaggcaaggaggaggaggctggtaccacaggtccagggcagcaagttgagtggaaagtctgggaaaggtttgtgtgggaagcacgggagactcttaccccatagctacgaaagtcggtttcttcccagccttgtgttccctgcttcatgaccaacaagcgcttaagtacgaaactcagaggagggcagacagaaatgatgatagctggagagagaattaagccctttggggagaggttatattcaacaagtgggaggagaggttcccctcaacttttgagggagtgggggatcattggaaaggcctggaatctagtgggaatttggtgttttgacatgaatgctctctgactttgtttttgccctttggctgtgtacctagtgtgtgtcagttcctggagctgtgtcagagcccagaaggtggctttggaggaggacccggtcagtatccacaccttgcacccacatatgcagcagtcaatgcattgtgcatcattggcaccgaggaggcctatgacatcattaacaggtacagtgaaagccagcagtgacagaaacctagaggagttccccgcctgctgacacgcactgactgttgcctctcctacctctttccctgtttctcagagagaagcttcttcagtatttgtactccctgaagcaacctgacggctcctttctcatgcatgtcggaggtgaggtggatgtgaggtgagtggggttttgcacaggctgccacatcagttgactctagagctcatctgccattagagatgccaagcctaaggaacatcatggggaagctgctgctttgtcccagaatgacacatgggatgacatgtcagtgacacgtcagaatcattcagatgtgatgcagatgtcctcaggtgtcatgatcacttgacttattttatgtaaatgtgaaaatataagaaacaaatgcttttgttttagaaattaaaaatacatttgtttggtacaaaatgatataccacaatataaataactgtatggtgtaatgtattccttcacctctctgagataggaagggaggggaaagtccagcagggcctcagtaaataccttctgagtgaatttgatgaaatcatgagaatgtctaatccctgaggtcctcctgaggcacatgagagtttttctgggaggtgcagagagccttgtgggccgggagagtgcagtgcaataaaatcgcattaactgattggtgccagttagctcgaaattattattttcttccataagtgtctgatgtaccaagcaagttgcttcctcacctggcagattacttatgaggcatacagggaattcattgaataagccatttctctaagacagtggcttattgagattttatgccattttcttattatttagttgagaaatacattttgtgaggtttctatagcaaagctgtcttactgcctatgtgtaaatgggtttgcttctacacaagttgattaatagtctggcttaagcatctggtttaaccattggtttgaaagtataggggaggaaaaaaccacgaacattgtggagcataaaatacattacagataataggtaatcaggctgcaaaggcctttagttcaagatgttcttctatctctaacttgtctaatccaaccaaaaaaattagattaggatctgtgtataccagtgaaaccagtagaacgactgaggtaaatcagtatgtgttgattcttcttaaggaaaatgttaaaagagtttttttccctcgtgttcactacattttcgttcctgttctgttgctattcccccaaaatatgcacagtcttgaaacgcagcttttaaaaacctactaagattattaggcaaaagcaaacaaatcatagcaagatccttttggtattttatcatataccttttgcagctgtgattatttgctatcttattcattccagcactttttttttccctatgctctttatttatatgttctagataaatgctaggaaacttctccagtaaggcagcttggttcccctgccragcactgtagccatattcttccctgacctttgctctttgggtgatgctctgccattcgtgcccgtgctttctatttacataaaggattaaagatatgaatgatagagaaaagctagcagattgcatccattttccttgctttgcctggtttctagtaccccgattccatcatttttcacttggcatttctttcattgtcctttgcctggaagcatcagccagtcctcaggagtgcttgtttgggtggatttgacttggagaaaagcagcagtgatgggagagtttgacatctggagactagctcgctgcccttctgggatagacagcagtctctggatgatctttctgctctgttacactgctgatagtttcagagatgagcctactcaagggtctgtagttccagtgtattgtaaaaaatcaaatcacagtgaactcatagcaagcactattttttctcagttcttaagaaaggagacctcctttctaggttatataatctagatcattctgtgaggataaggtggaggcagggatctagcatttgcagaagtttggtgagaaagcatgtgttgctcaagaaaggacaagttcagtgttgaagtgtagatggcctggtgggcaggggagcagtggagctggagggacaggctgggaacaggctacagaggccctgaaatctcctatggagtctggagtttagtgatgtgatctgatttgtattttcttagaagtttcccaattgcagtgatggactgtagtgttccaataaaagccctctggtttcagggctggagggagagagagcaggaagactgatccaggttgaagaaggcttggatttgggtgatggcagcaaggatggaaagttagtggacaaattcaaatttgagagctgcgatgactgggtggagggaaagggggagaaatacatgaaaaggttgtattacgtttcctccccatctcagcgtgagacctgggactcctgtcttctgtcatcacttcttagtcctcacacttgtgagaggcaaactgtattataggtcgcctcctacctcacaagtcacaataggattcaagagcaaatgcatctgagcctctttaagaggcctacaattgcaaggaaattagacagatcttcaaaattagctgctggtagatgatcacatttggcattggcacttgtgactcttgtgtgctcccaatgcctgctggtggaactaaacttccactgtgcctttggctgctaaaaatgctggtaggatcataatgcatgcagcttctgcagagacttctttggaatacctcagtaagtctgacttcatgttatatctatactgagtaagatggaaaccagggccgagcggcagtggctcatgtctgtaatctcaacactttgagagactgagatgagagaatcacttgaggccaggagttcaagaccaacctgggtaacacagcaagaccctgtctctacaaaaaatttttaaaaaattagccaggtgtggtggcatgcatctgtagcctcagctgcttaggaggctgaggcaagatcagtttgagcccaggagtttgaggttgcagtgagccatgatagcgccactgcactgcagcctgggcaacaaagtgagatcctatcttaaaaaaaaaaaagaagatggaaactaggcccttcttttatgtttcttaggagcccttaggaatatactttttgtttgttttgttttgagatggagtttctttctgttgcccaggcaggagcgcagtggtgggatcttggctcactgcaacctctgtctctggggttcaaacgattctcctgcctcggtctcccaagtagctgggattacaggcgtgtgccaccatgcccagctaatttttgtatttttagtagagacgaggtctcaccatgttggccaggctagtctcgaactcctgacctcaaataatccacctgccttagcctcccaaagtgctgggattacaggcatgagctaccatgcctggccaggagaaggatttttgagcagaattcaaaccaatgatttttgtcttccctgtgccgggtatttgaaaaaaccatagaggggaaggaaaggcagtctgtgtgtgtataccatgacagagggagaagctgaaataaaatgtgccccgagaagaattagggctgggaggatggaacagcaagaatgatcctaaatcaagtataataattttttgtgtttgtttttttttttgagacagagtctcactctgttgcccaagctggaatgcagtggcatgatcttggctcactgcaacccccgcctcccgggttcaagtggttctcctgcctcagcctcccaagtagttgggactacgggcacacgccaccatgcccagctaatttttgtgtttttagtggagacggggtttcgcaatattggtcaggttggtcttgaactcctggcctcgtgatccacctgcctcagcctcccaaagtgctgggattacaggcatgagcaactgtgcccagcctaataatgcttttttaaaaaatagcccgggcgcggtggcttatgcctgtaatcccagcactttgggaggccaaggcaggtggattgcttgaggtcaggagtttgaaaccagcctagccaacatggcgaaaccccatctccactaaaaatagaaaaataagccaggcatggtggcatgcgcctgtaatcccagctacttgggaggctgatacaggagaattgcttgaacccaggaggcggaggttgcagtgagctgagatcataccactgcactctagcctgggcgacagagtgagaccctgtctcaataaaaaccaaaacaaaagcaaaacaaaaaatatagacgtgcgcctttttcatttaacgtgtgtgtgtgtgtgtgtgtgtgtgtgtgtgtgtgtgtgtactggtgagaggtttgaaatcaaggctcttttctccctctagaggtttaaggactgtattggagtggactcacctgttcctatccttgtttgatctattacaatttggtggcctgttttgcagtttatctgttgcagaaaaagtatagttaatctttaatgtgtcaaggctgtaaacagaaatcctggctctgaaacagtactaacatccaaatgaatgagcatatcagaagtacctgaatgataccatagatttatggcaaccattataggtctttgaaagaagagctgaatccacttttgacatgaattgatatggctgttatttcctctgatgtagattggaccatgtggaggtagggagaatagaatgtcatgttctttcactgaagccatgccgtgagcaactctatccaaatagaatgtcacacctctcagttggagacccaggaggactgaccgtgtgccaagagtgaggacrggaggtgattacagcttactaggcaaggcgagcagtccgcccgcggagttcactgagcctcattagctcttccgtagagcttaatgtgtttcccrtttctgtctttccagaagcgcatactgtgctgcctccgtagcctcgctgaccaacatcatcactccagacctctttgagggcactgctgaatggatagcaaggtgagagaagccagggtttctcctggcctcttggaragcaggcggtcaygacactacttcagaaaaataaagaaaatgcagagggacttggaaggaaatacaaaaatcacaggagatccattagggttatctaatgatttttttaaatacttaaaatgtcttcttttttccaaactttctttaatgttatattatattttagattggcaaagataaaaaactttggtaaacaatattagtgagagcctgaattgatttaaccagtttttagagcaatttgacagtatgtcaaaggtgcccttgcgtaggacccagtaattccactcccacagaaacccttgcacacacgaatgggagagaggagcacaggacttgtttataagagccaaaagctgaaagcagattcagtgctcataagcacgagatgggtaagtgtggtatagttgcatcggaatataatgtagcagtgaaaatgaatgaactagagttacatgtatcaatatggaaaaatctctatgttgagttgaaagaatgaaaagaaaaaaatacaaaaaaaccatacagattagcacatttacttaaaatttgaaacatgcaagagaattctgtattgtttctgagaagaatcatgtggtaataatataaaaacatgtatacgaaagataaacaccaaatttagcatagtgattcccgctgaggggagagcaaaggaaatgagataagtctgcataggaracttcagctgtaatagttaacaacaacaaagacctgaagtgtatatggctaattctaagctaggtcttagatacgtgtatgttctatattttgtttgctgtactttcctggatgctccaaatatttcatagtttaaaaaaagcaggccaggtgcggtggctcacgcctgtaattccagcactttgggaggccagggcaagcggatcatgaggtcaggaaatcgagaccatcctggctaacatggtgamaccccgtctctactaaaaatacaaaaaattagctgggcatggtggcgggcgcctgtagtcccagctactcgggaagctgaggcaggagaatggagtgaacccaggaggcggagcttgcagtgagccgagatcacgccactgcactccagcctgggcgacagggcgagactccatctcaaaaaaagaagcaaaaggtatagtagacacatatatactatgatggaatgatagccaagctgagatactgttttagttaaaaaaattttatttttatcaaagtagtatgtattaccatataaatataatttacagtgataccagatgatatgctgagatcrtgtttacttttttgtatgagtttcattttcctggagttaatggatatatcatgaatgtacttatgaattccttcccaaattgtctgtcagagctataaaaaattactctaaacatagtcaaacccttcaggtaacctgtctctgtgcacacgtgcgttttgagttgccccttctggagccctctgccctcctgcttcagtctggacagattgctctcagcttgctacacagcaggcatcccgaagcttcctttcagcatgaaattcacttcatttctctccttcgttgaagtccctgtcctcctttttcttggttttcttattttcatgaagtattgtactccaacagatcccaaaaaagggtacctgggagatacatttttaatatcttgcatgtatctgtgttctaatctcacacttaattatttggttagagatttctaacttggcaatggtataaactgtagtctttctgaattttgtaagcattgcttcattatcttctggcttccaatgtcattgttaataaggctgataatagtaaccagagttcattgaggactgtcatgctcaatggtaaggcagctatagttgagagctggagagtaggcactgcctgtgtttggttctcttttatattttgtgtttctcagctgagattttccatctttttattctttatgagtgcatttttcttcattttgctgtggtaagtatggaattataatgtctgctttaaattgcttgtctgggaatttccacatctgtgtgtcctggagttggcatgtcagctccatgagtcttcctgtgctgagtgatgttgtgttgtgtcctagacattgtgatatgatggtggaggtgtcatacaacagaacggtatggattctgttggtttgccccaaaaggggttgatgttttcagtttagcaggcagtcaacttggtcagactcaagctacaaactgtcactcatgcagcagctcagagctcagttcttgcttagaagttgctttgtttccccagcacgtatgtggaaacttgaactgagtttaaatgcagaatttgggatttttcttctttgactttcctgtttctggattcgtcctcagtttctggcagcctgcatcttcctgccagaaggatggttggcttcccattagagtgttggctgcccgccctgacccctgacccctggcctgctgctgccgccctgggctatggctgccatcctgagggcaaaccagagagaaaaagttgtgggggaagggasggactaactgcatgctgttctctgttccaagtttcaaactccaccaaaatctgcctgccctttttcagtcagctgaaccctcaggaagctgtttttttgtattttgttcagtgtacagctgtcatttgcaggggggttgactggttaggcacagactagatacggaactcagacagcctgggtttgaatcccagttttgccctttctttcctcttctcttccttctttcttcctctrtctttcaattctctctttctttttttgagacmgagtcttgctctgttgcacgagctggagtgtagtggtgtgatcacagctcgctgcagccaccacctcctgggctcaagcaatcctcccatctcaacctcctaagtagctgggacaacaagcgcgtgccaccataaccagctaatgtttaaaaaaaaaatttgtagagatgggatctgtctgtgttgtccaggtggggcttgaactcctgggctcaggctatccacccaccttgacctaccaaagttcaaggattacaggcatgagccactgcgcccagctttttttttttttctttgaagacacggtcttgcttgttgccctggctggattgcagtgatatgatcacggctcactgcagccttgacctcctgggctcaagcagtcttcccacctcagcctcctgagtagcagagaccacaggtgtgcaccacaacacctagctaatttttaaaatgtcttgtaaagacagagtctcactgtgttgcccaggctggtcttgaactcctggtttcaagcaatcttcctgcctcagccccacaaagtgttggaattacaggtgtgagccacgatggccagcctgccatttctaattagctttgtgcttggacaagttattccactgctctgtgtcatagtttccttatatgtcaagtggtgggatactgaatttaattaatttaatttaatttatttattttttgaaagagggtctcacttcgtcacccaggctggagtgcagtggcgtgatcttggctcactgcagccttgacctcctgggttcaagtgatcctcctgcttcagctttccaagtagccaggactgcaggtgtatgccaccacacctggctaatttttgtgtttttagtagagacggggttttcccatgttgcccaggctggtcttaaacccctgagcttaagcaatccgcctgcctcagcctcccaaagtgctgggattataggcgtgagccaccacacccagcctttaaattttatattaagcagaaatacagagaaatcaaatggattccactgtgctgtactacctggcagtgccattgtgattcttaattctctgtatgtttttttcttctgtctctctttttctatccccatcctgtccttctttagcggcttggaatctttattctttttgtgtgtgatggagtcttgctctgtcacccaggttggagtgcagtggcrtaatctcagctcactgcaacctcaggtgcctgccaccatgcctgactaatttttgtatttttagtagagacagggtctcgtcatactggccaggctggtctcaaactcctgacctcaagtgatctgccctcctgagcctcccaaagtactgggattacagacatgagccacctcgcctggcctggaatgtttattcttgtttggaaacttgatgatgaatcttgatgtggattatttttattcattttgctgggcactcgatttggaagtgcatatactttagtaccaagattctttattacagtatttctttgataatttcttctcttgtgttttctgtgtttgctcttttttttttttcctttgagacggagtcttgctgttgttacccgggctggagtgcaatggcgtgatctcggctcactgcaacctctgcctctcaggttccagcaattctcctgcctcagcctcctgagtagctgggactacagaagcccacgaccacgcccagctaatttttgtatttttagtagagatggggttttaccatgttggccaggctggtctcgaactcctgacctcaagtgatcgcctgcctcggcctcccaaagtgctgagattataggcgtgagccaccacgccgggcctttttttttttttttttttttttttttttttttttttttttttgagacgtctctttttgttttatgtgtctcccagattggagtgcagtgacacgatcatggttcactgttgcctcgactttccaggctcaagtgatcatcctcagcctcctgagtagctgtgactacaggcatccaccatccgctaattttttaaatttttgtagagacaaagcctcaccacattgcccaggttggtctcaaactcctgggctgacgtaatcctcctgctgcggcttccccaagtgctgggattacaggtgtgagccaccatgcccagcctcttatttatttatttattatttatttatttatttatttatttatttatttatttatttatttatttatttattgagatggtgccttgctctgttgcccaggctggagtgcggtggtgcagaccagctcactgcaacctctttctcccaggttcaagcgattctcctgcctcagcctcccaagtagctgggattataggcgtgcgccacgacacccagctaatttttacggggtttcgccatgttgatcaggttagtctcaaactcctgacctcaaatgatcctcctgccttggtctcccaaagtgctgggattacaggcatgagcccccgcacctggccagccttttaaaaatatgacatcccattagtacatttgattgtctgacttttaagaatactttgaggctgggcgtggtggctcacgcctgtaatcctaacactttgggaggctgaggcgggcggatcacgaggtcaggagttcgagaccagcttggccaacatagtgaaacccagcctctacaaaatatacaaaacattagccgggtgtggtggtgggtacctgtaatcccagctactcgggaggctgaggcaggagaattgcttgaacccaggaggcagaggttgcagtgagccgagatcgcaccattgcactccagcccaggtgacagtgtgagactccatctcaaaataaataaataaataaaaataatactgccgggtgcagtggctcatacctgtaatcccagcactttgggaggccaaggcaggcagatcacgaggtcaggagttcgaaaccagcctgaccaacatggtgaaaccctgtctttactaaaaatacaaaaattagccgggcgtggtggcatgcacctgtaatcccacgtactcaggaggctgaggcaggagaatcacttgaacccaggaggcggaggttgcagtgagccaagattgtgccactgtactccagcctcggcatcagagcgagactctgtctcaaaaataaataaataaaaataaaaatatttcattgcatggttcgtttccatctcttaatccttcttcttatactttgagagattctcttagtatttatcttctaatcctcttgtttttatttttgtaatcctatttttagttttcctccctgactacttttacttcctgactacttttttatctactctcttgttcttttctggggatattttgtcctctcaatagtcttacttcatataatattttatctaaagatacaactttaaaaagttttcttttgctccctgtcttatttcctccaatttatttttgtttgttttggtctcctctttcatagtagagactgtggtcaaatgtctggtactctacagctgtctgttcatatttaaggatccagcactgaaaagctgctggggagctctgcgagagtgggcaggatcaagccattcattggggaattctcaaagcagtgtctgtagggtttttcccttgggcttatcagttccctcagagaggaatcttctaaattcctgcttggggtatgaaactggcagccttgtgtgaaatacacagaggaatggggctgggggtattgtgttgagattactgactctcacgtaatcacatttggtacagtgctccctcctcctcttagcttgttggatattctggaactcagatccttttgattaaacctctgaaacttcccatcttctgctggatttgagtaggggacttaaaggtctgattcttatataagtttgcaaccaacaaacttggttcagacgcattccactttgtggaggttccctgtatctctaatcctggagccttttattggagcagatcaccttgctttttgttgcccctctcccatccctatcctttgggtaggaaaggtttctctattctactaagtcagttatttcttgtccttcttgtgttagtccattttgtgtcagtataaaggaatacctgaggctgggtaacttagaaagaaaagaggtttatttggctcatggttctgcaggctgtttaagaagccatcaccacctggcctaattataatttttaaaaataacgtttattttttaatagtatacaggttcattataaaaactttttgaacaaatagaaaaacaaaaaggaaaaatattactagtagacctgtactcaaagatcaccagaggccaagtgcggtggcccatgcctgtcatcccaacgctttgggatgctggggtgggaggattccttgaggccagaaatttaagaccagcctgggtaacatggcaatgccccatctctacaaaaaatacaaaaaatggtccgggtatggtggggcacgcccatagtcccagctactcaggaggctgaggtgggaggattgcctgagtccaggaggttgaggctgcagtgagccatgatctgcagtcaacctaggtaacagagttaagaccctgtttcaaaaataaaagatcactagaatcaacaatcactctttaattttattttaacttgatggttatcactatatatatatgtatatatatgtatatatatgtgtgtatatatatatatgtatatatatgtgtatatatgtacatatatgtatatgtatgattttataactttttcccaaagagtaataatttgaattattatgtttcttacacaagtaggctgtttctaagtgtctgggtttttaacattttacagtttttattatacttacattttttggagacctagtctcactctttcacccgggctggagcacaatggtgtgatcatagctcactgcagcctcgaactcctcgcctcaagtgatcttcttgccttagtctcctgagcagctgggattacacatgggtgccaccaggcccagcttttttttttttttttttttgaaaagacatttccaaaagttaattagttggcatcttttcattcatagttgtgatggttcacaccttaatctgagtgaactttttctctgccacctaggatggtcctggtcttgtgtacgtccactcactggccactcattctgcttttctcaatctcttcttaggtgtcagaactgggaaggtggcattggcggggtaccagggatggaagcccatggtggctataccttctgtggcctggccgcgctggtaatcctcaagagggaacgttccttgaacttgaagagcttattagtaagtatcttttgagycatccccctctcaggccccaggtcatggtgatgtgattgtactcagacatgcagscttcaggagagtttggctatgggaagggctaagagagttagctctgttccaacacagaggaaggagtgagcagctgctctgtcttggctcccccttctgcctttctgtcttcctgcttagagctttttacatagtgtgtagactacatagactgtgtgctgcagacatctggtgtgagcagagtaccttccttatacttcagtttcgtagaattagaggttatcgtgtgttatagaaagaacctcctaagaggaaaagttacaagaagagctttgcagcatttcgaaaccaaacttttattacctgctgcactgtgtaaacatttagtacctacatttaaatgagttgtttaggcagagctggctaattgcattgagaaggcagcccaacatttatgtctggaccccacgctcctggccagtattcagaagaaactcagaaagcagtcagcttcagggagtcactagattgtagttaaatgatcagtgggtgcacaaacacacacacctccacggccaccagggagaaggcattccccgtcatgtcatttggggagcatgtaccccctgaccatgacgtcaaagcaaaccagctgcaactgacatgcacctcctctccctgagttcagatgccagcctcccgttatgcggcccatcgtgagcttcctggagagtttctgttgtaccctgtagacatgtaaccagcagtgtcttgcctccaccttcagaaagcctcccccggtgtagtctttttaaagattcatgaaggcttgaaggctcatgctgaaacagccaactttgtatgctgaacttaagagtttctcagatgttttaaaatctgaacaccaataaggcatgaaacaaaaaagtcccatctcccaggcagagataaggaatgtgattagggagtgcctcagttataaagacagtgttctagatttgaaccctgtccctactacatttgagacatgagtccttgggcaaattgtctaatctcttttagcttgatatttttttcttttataaggtagggataacaatccttatttttttaaggttaaaggagagaacatttataaacagcctggcacatagtaggtacttaataaatgttagtgtccctctaacccacagtaataatctttttggcacaagggaccagttttgtgggagataatttttccgtggacctggggttgggggtgggacggggggtgatggcttcaggatgattcaagtacattacatttattgtgtactttatttctattattacattgtaatatataatgaaataattatacaactcaccataatgtagaatcagtgagagccctgagcttgttttctttcaactagacagtcccatttgggggtgatgggagacagtgacagatcatcaggcattagactctcatgtagagcgtgcaacctagaagcctggcatacacggttcacagtagggtttgcgctcctatgagaatctaatgctgctgctgatctgtcaggaagtggagctcaggcagtaatgggagcagtgaggagcagctgtaaatacagattaagcttcactggctcacccaccactcatgtcctgctgtgcagcctggcatggtctgggggttagggacccctgctctaatccagactactcccttccatttgctttgggagaagtaggacccatatctgaagtatgaattcctatagcccaaggaaacagaacaaatccatgggcttaggcactggaaaaagtaaattagtctgcttaaaaacacttaagccctgcggtaagtagaaatgaggaaccgactcccactgcagcgcctgctttctctctgcctgagtaatgcttagcccacttccattacatgctggaagccctggttcatttaagatcaaccgaggatatattagtacctgaacctgcagtacagtgttttctgtctcttttaagcatttgtgactgtgactctctatgggcaggtgttgccttgaagagggaataatctaaacaacagcttttaggggagggctggcccccacttccatcaagggtcccagtggctcctttcaggacctttacctagtaagactctagaaacaggaagtaccctcccctgtaccctttcagttgagtgaggcagctctgtaagtccgtggctggaayggcctaggtggtctagggagggaaatggaaatgtcatatctgctcagccagttggttctgctcattctgagggaccaaacccatgactatcttgatctttgtagtagagtgtgtttagaaaacttgtagataagcaaggaatggtggtatcgtgtgtgaccgctgagtgacatcaagaccaagacctattttacagcttcaaagtaaaagattttcttatatcagccacagactgggcagagttgtcatttggtaattagaatgaatggcttctgctttcaggcctgctagtgacttgctaagagaccttgggtaaatttccccaggtgccaagtaaaagtcaggagcagtttgagatcatctgatgaaatgtagtaccaggccgggcacggtggctcacgcctgtaatcccagcactttgggaggccgaggcgggtggatcatgaggtcaggagatcgagaccatcctggctaacaaggtgaaaccccgtctctactaaaaatacagaaaattagccgggcgcggtggcgggcgcctgtggtcccagctactcgggaggctgaggcaggagaatggcgtgaacccgggaagcggagcttgcagtgagccgagattgcgccactgcagtccgcagtccggcctgggcgacagagcgagactccgtctcaaaaaaaaaaaaaaaaaaaaaaaaaaaaaaaagaaatgtagtaccaaattccatttatctgcttttaataaactccccggagcagggaagtaatgagaaatgagctactggtagtcttgccttcaatttccaacttaagccatgtttattaagagactttgaaggtctccttacaaaccagcttggcctctttatcttctcagcactggcactgctttggaacccaggaaaaggtagttgtctgccaggcattgagcagagatcagtgctggatgcctctacagcgttggcttaaatgcttcactctgtgtctatggcagtgtggggagggaaggaaagaaaaccagagcaccaaaactagagtgccaagaagccacaagatgggaaaccctccatcccacagattgactcctggagatyctgtygggctggattttgtctcttttagcctacaactgcctttcccatctgtgtctcctcagcaatgggtgacaagccggcagatgcgatttgaaggaggatttcagggccgctgcaacaagctggtggatggctgctactccttctggcaggcggggctcctgcccctgctccaccgcgcactgcacgcccaaggtgagcctggggagctgttcacttggggctggatgatttccctccactactcacaaagtctggaagcccagcgtgcttttttagrggggttgaaatgagctctgtctatcctggattttgagtgcccagtgtggaacctcatgccgtggggcatgcgaatgcagagtaagatttagtttcattggtttagtgtcattctttgcttcttcaaattggctgcgacagaatgagcttccttgaaattgctacggggagcrgggaggaagtrggcgctgcttctgygttatctggaaggagcagcccactcctgtcctgggctctgtggtgattgccacctcctctgggtgcagggcagagctgaaaaccctcagtgttgcaacagtcactgttgcaacagcaacaggaaaggcaactgcgtaaaggggtagagaaccagaacccatgtgtaggggtgggttgtaggggtgggttgcccctacaccatggagaagagactcgccgtgtctgactggctgcagagttgtcactattagaaatgttttattttacattcattgaataagcctaaatgggagtttgttccacctgcaccattggagtagagaaatccacgttcgtttctgtggggtctcaaatgggaacgcaaaaccgaagtagttagtgagcaaaaagtctgggaacattctctctctatctcttgaaacctcagtctgcctgctaactcctgcaccatctttctggtgtacttgatgtgagagcaggtgtctctgagtagacctgtgggagagaggaagtcatggggccctgctggttgctgatctgtttttggaatgagatccctgggtccaaagagaagctgttcttcggacttagttggataatgtaactgctcaaatgtaaaagatgagattcttttctgcccctccccatacttttttttcctgtttctgagccccccaccccccgtcttcccccctccccgccgcccccgagatggagtcgtgctctgtctcccaggctggagtgcagtggcacgatcttggctcactgcagcctccacctcccaggttcaagcaattctcctgcctcagcctcctgagtagctgggactacaggcgcgtgccaccacacctggctaatttttgtatttttagtagagacagggtttcaccatgttggacaggctgttcttgaactccttacctcaggtgatccgcccacttcggcctcccaaagtgctgggattataggcgtgagccaccgcacccggccctgagcctcattatttagtttcttaatttcctttgagttgttgagttgtgaccatttctgacactgaattaaagtaagcagagcctctgtcccattttcccggcctgggcccactgggctttaggtgtcagtattaaggcatataaggcacttacccttggaacacagcaagtgcactgtcagcaagtgcactgactttggagcctgcacagtctctgccttgaccaccagtagggaagtcaggaattccccaagtcaaacattttttattttagtattatttttttttgagacggagtttcactcttgttgcccaggccggagtgcaatggatcactgcaacctctgccccctgggttcaagtaattctcctgccttagcctcctaaatagctgggattataggcatgcaccaccacgcccagccaattttgtatttttagtagagacagggtttctccatgttggtcaggctggtctcgaactcctgacctcaggtgatctgtccgccttggcctcccaaagtgctgggattacaggcgtgagccaccgtgcctggcccaacatttctaagatagaaaaaaacttggggtcatggtgatctctttatttggaactggtgaggtcaagcccctggtaaaatggtcagtcttttacaaacctgtccctggcatggataagactcagtaattctgcaatcccagggaaatgtggaatgagctataacaggagcaccacctgtcaaagtcttccaggggggctgctggttaattgtttcttgtagcacatgttctagggggcttagtggcattcaaagctttgtctatggaaaagggtgcctatgaatcttggtgcttccagcttttttcattggctgggagaaggcctgtgttgtcttctcagacacagggcatctcttgaacttggaacagacaggagtctgtaaagaagggaagtgtgttgaaaggagggcaaaatactgactttgggagtcaaaaggggatgcagtgtagaaagatagtcacaatatattgtgatcatatcaaagcaatatgtgtggaatcccatttttagtgaagagttgactacaaaaaattcatagaaagtatctaggatgtgaagttacaggtgatgtttgcttctgtttgtattttctaatctttctatagttaataggtatttcttgcataaaaaaagacaacaaaagttattttacagaaacagggaaattctacaaacaaaacaagcaaaaaggtgcgaaaaatatttataacaagtgatgaatggctaatttctttaatttgaaaaaaaatcatacaaaccagtaagaaatggatggacaacccaactgaaaaacaggcaaaggatctgaagaaagaggtcccagtgaaagaactgtccttcttactttttctactacaactgccactactactggtagcggagtcttcccaagccctcactgtatgccaggggctgtactgagcatttcacatatgttttctcatttaattctcaaaacaaccctatgaaataggtaccattgtttacagatgaggaaacaaactacagtgaggttaagtgattgctttataatacctgattggcactcacaagggttagtatgtggttgtgtgaatccagactagctggcatctgaaccctgccctgctcataaccacagtaggtggccattaatccaacgaaaaattgtttagctcacttgtagtaaaagaaatgctaatcaaaagagtggcactatttgtttttattattggattggcagagattaaaaaacttgataccctatgttggggagagtgtgagaaaacaggtaatttgatagtggggatgtaaataggttaagtcattttttggagggcagtttggagacatccatttaaattataagggcacttaccctttgaacacagcaagtgcactgtcaggaatttacctgcagggatattagcaaaggatgtatattgaagtggagtttcaatagcagcctaagtgcctatcaaaaggttaagggttaaataataaaaatctctccaaacagtagctgcataccatgggctgatatagaaagctctgcaagatacaacatgaagtgtaagggggcggggcctggagcagtgcctgggcacacagcccgagatgtacacagcttttcctggaaccctacacaaaaccccttgaacaatgggtacctttgggagaagagaagcagacagaagacagaaggagggagactttttagatttttttttttttttttttttttttttgagacagagtctcactctgttgctgaggctggagtgcagtggtgcaatctcggctcactgtagcctcctcggttcaattgattttcttgcctcagcctcctgtgtagctgggattacaggcgtgtaccaccacacccagccaatgttttctatttttagtagagacaggatatgactatgttggcctggctggtctcaaactcctggcctcaagtgatccaccttccttggccacacaaagtgctgagattacaggcgtgagccaccatacctggccaactttttagattttctatccttctgtattatactgtgcctttaaaaaaaaaaaaaccatgtgcattactaattttattttggtaaatgtacaaatacattttttaaaaggcattgatcatattgctaactaaaaagcaaaaagaatgctctacatagtgcagcacgtgggtctaggccatgccctgacccagcaagtgaccatcagtggctccatgccattgactaccttctatgtgtaaatgacagtatttgagtagaagaaggaattactattagtaccttaaaatgctggacatggtggttcatgaccataatcccagcactttgggaggccaaagcaggaggacctcttgagctcaggagttcaagaccagcctgggcaatatagtgagagcttgtctctacaaaaaattaaaaacagttaaccagacatggtggcacatgcctgtagtcctagctactcaggaggctgaggtagaaggatcacttgagtctgggaggcagaggttgcaggcagagagtgccactgcaactccagcctgagcgacagagcaagactttgtctcaaaaaaacacaaaagcctgtaatcccagcattttgggaggccgaggtgggtggatcatgagctcaggagttcaagaccagcctggccaacatggtgaaaccccatctctactaaagatacaaaaaattagccaggcatggtgccacgttgcctgtaatcccagctactcaggaggctgaggcaggagaatcccttgaaccccggaggcggaggttgcagtgagctgagatcgcgccgttgcactccagcctgggtaacagggcaggactccgtctaaaaaaaaaaaaaaaaggcttaagaaatctcaagtgctgactaaatcagtgagttactttgtttttttgttttgtggagcaataagaaagcagcaggcctgtgagtttccacttggcttggtagttactggtttcttatatgttcttttggacataccctggaattttcttgcctacctgtgaaattgagctacagatggctgcacctatcagttatggtgtggaaagacttttgatttttttagataaaaggaacctttgaaatgcaaaatgagattagaatggcgacctataatttcaggaagaggtagaaaggatttaaaaggtggattccagtgtgcagttatcaccctataatcgtatctgctttcatcttgttgtgattatgtgtgctggtgtccaaattcaggatatctggaagctccttgtagagcttttgaactttgagcttctatgctttaataatataggaagtcactgaaacagtctatagttttttatataataaacatagcgttttcttttcagactctaattttagccacaggttatcatttaccttataataatagtcttttatttgttataggatatgaaatatatgtacattttgtacagatgtgtaatgcagtttcctaaagtttaataaatatgcttttttaaataatagctttgttgagatataattcccataccacacaacttacctattcagttgcgaaccatcatgacaattttagaacattttcatcactcatccccccaaaaatccccatacacattaaatattttcttaaaaaggaaatcgtgaaggaaaaatcaatagtatgattacaatattaagtataaaacatatatatgttttacattaattaaattttaaaaattttaaaaagttttaaactcacataaccaaaacagaggagcaaaaaggagaaaatagatgcagcatatgatgtagacaaggggcaagtataagaaaaagctagattaataaaattggctattggatctcagaagattaggccaaacagacaccatcataaggaaatgcaaatattaaacacaagttatggaaaaatttcaccctaattagtaatcagaggcatgcaaatcaaaataaactatcaggtactatttctttttaccattttaattgctgataacttttaaaaagtaactaaagctggccgggcgtggtggctcacgcctgtaatcctagcactttgggaagccgagttgggcagatcattttaggagttygagactggcttgatcaacatagtgaaaccctgtctctactaaaaatgcaaaaattagccaggcgtgggggcttgtacctgtaatccaaggtactcaggaggctgagacaggagaatgacttgaacctgggaggcagaggttgcagtgagctgagatcacaccactgcactccagcctgggcgacagagcaagatagcatctcaacaacaacaacaaaaaggtgctaatgctggaggtggtatagcaaaattttaaattttgctggtagctatataaagtctttgtttttatttttagtttatttatatatttatttttgacagctcctgcagagcagggctactccacagggattgtgctgagagtagtctataaattcttaaagcagtttatcagtatctattaaaagccttaacaatgtttattccctttaaccgaataattccaccgtggtcagtctatttgaagaaaataatcttaagcatacataatattgacaaagatttagtccagcattcctcataatggcaaggaactggaaacaaccttggaaataagtaaaagaagatagagtgaagtcccatcatatatgtatgtatcttctacaacaaagttcactgtgcttacaggtgaggaaaagaaaggaagggaattaaaatagtgcaagtgtatcaaagcatgtggcctgcagccagcctgagatgggagattggatgcttctccttaggtcggacttagtttcctgtgtctcttaatgggtgtttcagggctgagtgcgactcagggttgaagacgagaagcttttgtccctggcctctaaatgtcacctggccactgtccctcacctagtgctcaaccttggaaacccttttcctctgtgtctctttttaaagaaatttaataaattcttattgtctgtttgaaatattcaacaatttaggctgggtgcggtggcccatgcctgtaatcccagtactttgggaggccaaaagagggtgggtcacctgaggtcaggagttagagagcagcctgaccaacatagtgaaaccatgtctctactaaaaatacaagaattagccaggcatggtggtgcatgcctgtaatcccagctactcgggaggctgaggcaggacaatcgcttgaacccgggaggcggaggttgcagtgagccgagatcgtgccattgccctccaacctgggcaacagagtgagactctgtctcaaaaaagaaaaaaaaaaaggaaatattcaacagtttaatattttgcttcaatctctttatagactgtatcataaacttttcatttttatttttagaaatcttttcccccgtttttcttttttgctattttctccaaaatgggaaaggttattgataccataaacttttataattttcaccataggaatttttttttttttttgagatggagtctcgctgtgtcgcccaggctggagtgcagtggtgtgatctcagctcactgcaaactccgcctcctgggttcacgccattctcctgcctcagcctcctgagtagctgggactacaggcgcccaccaccatgtccggctaatttttttgtatttttagtagagacagggtttcaccgtgttagccgggatggtctcgatctcctgacctcgtgatcaacccccctcagcctcccaaagtgctgggattacaggcataagccatcgtgcctggcccaccataggaatttatatactgacatatatataagatttttagctcagttctttttatgatacagttaccttatatgtccacttaatgaaatactatatggctattcacagtgatggctatgcagattatgtaatagaatagaaaatttatgcctatagtggtataagtgaaaaacataagctacacagttataataactaggtagaaaaacgcatagaaccaaaaagactggaagaaagaacaattagctttcaggtgccatttaccaattgttgggcatcttttttttaaaaatgatttattgtcaggcatcttttagcccaggtatcaaaatataaaattgaccaaggacttartgtacatcctatatgtatatatatttttaatcgatttctatgcagatgtttctgcacacctgtccgtgatttgtccctccttcccacttgataactgtgtggcccacagaattctttgaccatagtgattggacttcagagtgaagaagtccagttgcttgtcagtaccttagtagtattaccagaatacccagtttttgctagggtatcatatgatgcaggagggcagttactagtaatgtttcttaggtaaattctttgagctgagagacaagttagagaattccctttggagatcaattaaatttaggcttagaaaagtagaagaaacagactttattacccattaagagttctctgagctaatcagtctggttaacaagttatagagatatgctagagggaatgtctcttgaagtccagggtagagttatggaccaagttgggagcagctaccgaggtcagtctgggaaggtaagctaaacagctaggctggttcactgcctgccagagatgtggttgaggatcaccatccacgttaacagggtgcatttcaagaaagtgaaagtgccactttgaattgctgctctttgacacatgtcaaagttcaggagaagggacatgctgtgcgtaggacatggggaagatagcagttgtaccaagaatgaatggaagaggaaggggagcaggaaaccttgactattcccccaggtgagaaagtggaattaggtcattgatacttggctggatctgccgggcccttactgaccctttgcccttcaacaggtgaccctgcccttagcatgagccactggatgttycatcagcaggccctgcaggagtacatcctgatgtgctgccagtgccctgcgggggggcttctggataaacctggcaagtgagtgttttctctctggrgagggaasggagaggggaggagagagcagaggggcgtgcacctcaggcctactcagagccagatctcaagagcagaggtgtcaccttcagcacctgcatagcgctaggttgtatgggaaaaagcacccagttgggagcaccccttgaggccattgatcytggcacctccagctgcccgtcttgtcccccagcctgcatgcaaccccctcccccagacagggaaacagattgctgggtagataactcttctttttttwaaaaaaaaaaaaaaaaaactgatctaaatagaataggatacaggattttaaaacccctcagtgttgtaaacagagactgtaatcatgacaactattatagagtggattaaatgattaagctcaaatctgagatggcttatgtgttagaaaaagggaaataaaataagtcctctcacctttgttacccaccctctgtcttcccccatcccagcacacgtcctgctgctcttggcatccaggggaaggcctggtcccacaatgtatcaggaagaatgtggcccatttctagatatttaggtatttttctagagaagtgtatcaatttatcattagtactgcccctggagagccctttccagaagacagctggagagrctgactttaaaattacagtttcctttaatagtttaaggtaaaaaaagaaagaaaagaaaaaaaatacagttcccactgctgggcagggctggaggatggggcttttattttattgtattttacttttttgagacagggtctcactctgtcacccaggctggagtgcagtgtcacaatcatgactcactgcagccttcacctcttgggctcgagtgatcctcctgcttcagcctcccaagtaactggaattacaggcatcggccaccacacctagctaatttttaattttttgtagagacggggtctcccatgttgcccaagttggttttgaactcctggcctcaaaccgttctcttgcctcagcctcctgcttgctgggattatgggtgtgagccactgtgctcagccagtggggctttaaataacactgctgggaaaaccatgcctcctctagccacatggaggatggggggggacgtgtgattgcaccagtggtctctgaattggtgtggctacatttgtagatgtgtgcggagcagaggagcgcctgctcagagctgcctgtccttacaggtcgcgtgatttctaccacacctgctactgcctgagcggcctgtccatagcccagcacttcggcagcggagccatgttgcatgatgtggtcctgggtgtgcccgaaaacgctctggtaagacgggtgcagggcttcacaccccttctccacagggacctcgcggacagaaggctttccaagtaagcagaactggctctgcatttcctgtgtggacaggcggaagcttgtggtccctctgcccttcgagctgtgcagcygttagtgaggatgtgaccacagaggagacgcacctctgggcaagctcagggttccagatgggcggtctgatctgtcaaagagctgttgtgcctttatcccagggctgaggacctagcccactgctggtattagcttcccctagaggaggccacagttacgtgtcactctgaggctgtgagtcccagcaggctcgtgatagcactgcagccatgcggcactggctgtacagcctgccgcgtctctcccagaggctcagcttagatgccatctcttcagagaatgagatccccagaatgctctgcctcagtgccttgttcatattctttgtagtactttactcagttggtggtgtgttgtttaatgtgtgtttgtctgctttcctgaaaaaacaatagccctatgagggcaggatgctcactgctgcagccagctgaggacaacctggaggtgctctgagcctagacgtgagcctggacatgaatccaatggagactgtccccagtgatcaaatcacagggcccatgcagactgtcatgaatttttgtgtgcagttccctactcttactaagccctacttccaccagtgtaaacatggcctgctgctaccatctaggtcactgccttattttctcatctgtgtcattgtaaccttccttttttgtttaaaaaaawtttttttttaatttttaatttttttttgtgagacaaagtctcactctgtcacccaggctggagtacagtggcatgatattggctcactgcaacctccacctcccaggttcaagcaattctcgtgcctcagcctcctgagtagctgggattacaggcatgcaccaccacacccagctaatttttgtatttttagtagagacagggtttccccatgttggccaggctggtctcaaactcctggcctcaagtgatatgcctgcctcagcctcccaaggtgccaggattacatgtgtgagccaccacgcctggccccatctttgtttcttttaattgggaaacatttcaaatggaagaaacacaaatggccaatagatagttgaaaagatgctcaacctcattcttaatcagaaaaaccaccacccagcttttccaggccctaattatttccccctatttgcctcttatgtagccctcttccagttttttttcctccctccttctccagaggtaaccctgtcccaaatttgacatgtatcatgcctgtggatgtttttgtgctattgctacatacatatgtatctataagcaatatatagttttttataagcaatataacagttgcttgcatgttttcaaactttttgtaatggtacctactgtaccagtcattctgcattgctttttccacttgccattgtatttttgaggtttatctgtgttcacatgtgttgctccagtttattcattttaactattatatgatactcccttatataaatgtaccccagtgtrtttctctgttctcctgctagttatcaattttttgctattacagtgttgcagtgaacgttgtggtatctgtctcattgggttcacatgttagaatgtctccaggaggggacctgctgggttgaaggggacacatattgtcatctttgatagatacctctgtaactgctccccagtgtggttgtgtaagatgaatcgatccatagtcagaccttttcctttttgccaatttgatgggtgtgaagtggtatttgtttgattttgtgttttcctgattactggtgaggttgagaatattttcaaatgtttgttggccatttgtgttgtcttctgcgaattgtctgccagttcatattctgtgctcattttcttactgatgggtaacttcagttgttttcccttaagtatttgtagttctctgtatatttttaatactaatcttctatcagttacatgtgtgtagtgaatatcttccagcttgtgacttgtcttttcattttgtgactctgatttgcattgctataagagaatacctgagactaggtaatgtataaagacaagaggtttatttagctcatggttctatagactgagaaattcaagggcatggctctggcttctggcaagggttgtgctgcattataacatgtggaaatcaaaggggaagccaacccatgcaaacagaggagagcctgagagcatcctggctttataacagcctacccttgcaggaactaatccattccctcaaggactaatccagactccccagagcaagagtgagagctcacgcactactgcaagaacagcaccaaggcactcctgagggatccacccctcaaacccaaacacattccacaaaccccacctctcaacatagccatcttggggatcagatttcaacattaatttttgtggggacaaataaaccacatccaaaccatagcattttgtttttggtgtttttttgttaaatagaagattttargccagatatggtggttcgcacctgtaaacctagcactttgggaggctgaggtgggagaatcgcttgagcccaggtagtcaaggctgcagtgagctctgtttgctccagtctgggagatagagtgagaccctgcccccagcaccccttccccacaaaaatattttaatattttaattttgaagtggtcaaatctatttgtcttttctgtcattcaggggtttgtttttgggggagggtaggtgaggattaacttaaggaatctctaccattttttgagggaagcagacaaaaggaggcacacattaaacaaatacatcacaaattgtgatgcgtgctatgaagggaatgaacaaggcaatgcagcaagtcattaagtgtaacttcttctaaatagtctaaagcttgcttttttaatctagatttttaattctcttggatttggtttctgtgtatggtgaggcttggatataatgttatcttttttccatatggataaccaattgaccagcaccatttactgaagtctacaacctttcctgctgatgtgtatctcatgtgtaccacaccctcaagtttccatacatgaaggggccctgtttctggactctcttattttgttcctttggtctgtttgcctatctgcactcttttaagcaagtctgaaaacaggtaggcaagtcctgtctgccttgttgtttttcttcaaaattgccttggctattctttgccttttgctttttcctgtgaattgtaggatcagcctgtcaagttctaatgggatttttattggaattgcactacattttagattaataggagagaaccaacttttttttttttcttcctgtcttcccaggagtacaaagagaactgacttcttttcaatatttaggcttccatttatgaacataatttttcttttctttaatgtctttcagtgttttttttataattttttccataaaggactagcattttttttttttcrgttagagttatgtctaatttacagttttcatgtctcttgtgactggaatcttttcttattttcagttttgtaactgtttgttactagtgtatagaaatgctaataatatttataaatcttgtgtccagccaccttgttgaactctttaatagttttaagtttgtctaagttagtttccattttatttttcttgccttgtattgttgggtaagatccccacatagtgctgactaaaggtagtagagggcattcgtctcttgctcctgattataatgggaaggctttttataacctgatcattaagcatgatgtttactgtaaggttgtgatagttacattatatcaagttagtgatattcacttttattcctgatttgctaggttgtttttgttagtttcagtcataaggtagtgttaaattttattgaatgctttctccgcatctgatttttcttctttaatatgatatgtttcattaatattctgatgttaagccttatattcccaggataagcccttcttggtcatagtagaggcagtgtktctgtgtctgtgtgttttgttcagtatactgctggattcagtttgccagtatgtttgcctagtacttttatttaggatttttttgcatgtacattcataagaaagattgatctaaaattttattgtattgtccttttccagtgtttcaggataatatcatagcctcataaaattaaatgggtagcttcctgcacctcttaccttttttctttttcttttctttttcagagacatgatctcactctgtcactcatgctggagtrcagtgctgtgatcatagctcactgcagcctggaactcctgggctcaagctatcctcctgccttagcctcccaagtagcagggactacaggtgcacaccaccagaacctgctaatttttaaattttttgtagagacagggttttgctatgttgcctagtctggtcttgaactcttggcctcaagctatcctacctcagccacccaaagtgctgggattataggtgtrarccattgtacctggcccccgcactagccccyttttttttttcagtccttaaaaggtttgtatagatcagagattatctgtttctttgtaggtttgatactacttgcctgagaaaccatctaggtctagtatcttttaaggtatgtgggggtggcagaataagcaattgttgttactaatttcttcatgtaggcctttaaaaattccttaagtcaattttggcagttttcctggtttttaaaaattattgttttatctgaatttttgtatgtttcagcatgaggttgctcctagtattctctcaaaatttttaaaatctctcctgcagttgtgtccccttcttcattatcccacagtgggagaatcctgaatattggcctaggattatgccgtgtcaaatctaaagtttcttttgggtttctgtgatgtactagaataacatctatttaatttaaatttcatatttaaattttgtttatatatttaaatatgatctgacagccttactacatattagggttgtggtccttttttcttttttttttttttttgagacagagtctcgctgttgcccaggttagagtgcagtggcacaatcttggctcactgcaacctccgcctcccgggttcaagcaattctcctgcttcagcctcccaactagctgggattacagacactcaccatcatgctcggctaatttttgtatttttgtagagacggggtttcaccatcttggccaggctggtcttgaactcctgacctcgggtgatccatccacctcggcctcccaaaatgctgggattacaggcatgagccaccgcgtccggccccctttttcttgattataaatgtaaatacatgtttattgttttaataattgggatacataaaatataaaaaagaaaatgaaaaacaatcatatcactattaatattttggtatgggtacaatttttgctatttatatacatcacaggtacaaatacactttttaaaaagtttgagaccaggtgtggtggctcacacctgtaaccccagcactttgggaggccgaggcgggtggatcacctgaggtcaggagttcgagaccagccggaccaayatggtgaaaccctgtctctactaaaaatacaaaaataatcccagcactttgggaggccgaggcgggcggatcacgaggtcaggagatcgagaccatcccggctaaaacggtgaaaccccgtctctactaaaaatacaaaaaattagccgggcgtagtggcgggcgcctgtagtcccagctacttgggaggctgaggcaggagaatggcgtgaacccgggaggcggagcttgcagtgagccgagatcccgccactgcactccagcctgggcgacagagcgagagactccgtctcaaaaaaaaaaaaaaaaaaaaaaaaatacaaaaattacccaggcgtggtggctcacacctgtaatcccagctactcaggaggctgaggcaggagaattgcttgaacacaggaggcagaggttgcagtgagctaagatcgtgtcaatgcactccagcctgggcaacagagcaagactctctcaaaaaaaaaaaaaaaaaaaaacagtttgagatagtattgtacatactgttttctcacataatatgttgtaagtatttgcctgtatcgttaaatatttaaatgcgtgtttataatggctgtatattaacctgtgtcccatgtactagatagttttagcaaatacaccatttttgaacctttgggctttgtgtgtatctctgattccttatactaaattcttagaagtgcctttcatggagcaaaggatgtgttatgttttcaaggaccaccggggtgattaactggcaccttttcttctctttgcagcagcccactcacccagtgtacaacattggaccagacaaggtgatccaggccactacatactttctacagaagccagtcccaggttttgaggagcttaaggatgagacatcggcagagcctgcaaccgactagaggacctgggtcccggcagctctttgctcacccatctccccagtcagacaaggtttatacgtttcaatacatactgcattctgtgctacacaagccttagcctcagtggagctgtggttctcttggtactttcttgtcaaacaaaaccaatggctctgggtttggagaacacagtggctggttttaaaaattctttccacacctgtcaaaccaaaaatctatcagcccacgtggtgtggttggtgaacagtgcatgccaggaggaagcagtccctcctcaccagctctccagccaggacgatcacacagagatgaatggcatctgagtattacggcatccagagccactgctgactcccacttgcacgccaccattcagtcaccagactgggtgccctccgatgggtggaataagtctgcttcatgccaaggctgggctttgggtcccaccaagatgagttctctgtaagactgtggtggagttgcaccaggaggtgcctctgcctctcgacttgcaccctggtcatttgtaagggaaaagagctggaggtggggagagaaagatctccttcagttgggagtccttccacttcaacactggagaactgagccttgcatctctccagggtccaaggccacgcttggtgcacaggcaagacttgcttcagccccaggtgtggtgacttagacctaggaaaccaattatgagtggaaagtgaccctctagttcaactgtgccagaggaaacagccctccagtgcccacctgcctcactcctccctatcatgtaccgtgaaaaccccctctgatggcctcaaggcagtgcctgcaggccgaggcccttctgggggtttctwtcttycttccaccagactccaagcccactctcctccaagactgtgttgtcttttctcaccaagagtattaacactactaagtctttcaccttaacttatgactcaggatttattcacgtcctgcccactctaggctcacaggaataaaatcaagtgctagacacactggctgctactaaggcactagcctctgtagctggtggtggcagcgtggggtgccgcccagcgtgctgggtcctggcagtgcctctgctgtgctgcacattgagccctttctcagtcagtggagtatcaagttgggccatctgtctactgacctggccttcatgtaagcagctgtgggctgcgggcagacaggagctcagagatgcagcatgaggcgcttagaaaaacctggccatttgctgcctctaattcccttttgctttgccatattgggctatgtattacctccttgaaataataaaagaataacattttctatgatgtctcttatttgtgatctgtaccaagaaaatgcccaatggtaggagctactaaaggttgctcagggatcgtcagtctcctgtgtgcaggattccagactgttcacatcggtggtgacagaggaatgaccgagttccatcctcacatgccgtctcctccagtagaggaagccgtgggcctaacagagagtgggaagagatgttttccaagctccctggggtaattcggtatgctatgtcccagccctccacacactgcacttcatggtctgtctccgacagacagcaaggactgggcctagtagccccagagcaggctgacttagcaagggtgggtggatgtctggccagaggcaggggctgtcacagggacaggctggaactctgtggccacttggctttcccttcctctggcgagagaccctctcccatgggaggccaagaacatggatgtcctgtggcctgaccctcttggaggggagagaagatggtgtccttagagggcacccaaatccatgtaaataagccaaatgcacatccaggaatgtaattcctgccccctgtgctatttttgccctgttaacaaaggtttgcactgcaaggcaacatattgaaatgcatcctttccatcactataacaaaaggcaaaatcctctcagcactcggagcctcaaggtattgtgagattaattgcagtaataattaatgtggttaatagaagggattgcttcagtctgaactggctttttaccaagaaggagggatctgagttgggccccaaagggtaggtaaagttagtctgggtagagaagagaaagggttatttcaggagagtttacactggcatatccatgagacatccttttccagagggtttcctgacagccctcaaggtgagtcctagagatttgtctattcactcatttgagataggatcttgctcaaatgcacccaggctggagtgcagtggcacaatcatggctcactgcagcctcgacctcctgggctcagaagatcttcctgccttagcctcccaagtagctaggaccacaggtgcacaccaccacagctagctaatttttgtattttttatagaaatggggtttcaccacgttgcccaagctggtctcgagctcctgggctcaagcaatcttcctgcctcagcctcccaaagtgctgagattacgggtgtgagccaccgcacctttggagagatttattatgtgactccttgagtagaagacatttatgtagcattcaaggtggatgaccccaaatactttctcccatcaataaacacaaaactaatacagatctctgtatccaggtgggctccagtttcacccttaggcccaccttgaacaccagataagttgggaagcctgccagaccctacagggagcggagcataaagagaacctcatggataatcaggggaaacacccctgagataataataccagtaaacaatagttccacactgctctcccttcttggtattattgagcattcttccatacctttcatgactgggatgcttttcatgtaatattagtgtcaagtgacaaatagtaaggattggaccaagcattctagttgcccacatgcactgcttggtggcatttactgcctttgaataggaaggaaagtataatatgatttaagacaccattgcaactggtagaaaacttgacccaaactggcttttgaagcaaaagaggcaatctgttgactcaaactgcagagtccaggaattaggctggtcctattaggttcctcaccctccctccatctttctacattagcctcaatctcaggctctccatggggttgtaaaatggcagcaccaatagctccagaccctacatcctgttggggtcaggttcagcagacaggcacacttggttccaccccagccttccttccagcgagtatcattgtgtttcactggctttaatcaaaccaagtgcctttccaagaagcagtccaatggcttggagaatacagtgcaccaattggccaaagtcttggtcacatgcctctcccttgagagggaaatgaggcttcattagaagcacgtagtttttgggaacggggaaggaacaaagctccaaatgcaaattaggattgttgccaaaggggtaaatggatgctagagaggcaaatggccattgctctcaaacagtgattactgggatagaagcctgtagggacactgttggcatccatgccactcctccccacctgtggcagccaaaaggtttgccagggcttgatgccctcctacctccaggcccaggccctgactggctaagccaataattttcatttatctctctttgccccagtaatttgttcaggttgggagtaactcaggcttaagtcagtcagcatgatttgtccttgccccagtgatcaattcagagcacaagcatgtgacctaaaatagtctaaagagagagacgtcgtggacactgtatgacagggggaaaagcagctctttcctattaggggatggtagaatgtgtggcctgggcctcctataaccatttttctacctagaaggaaaccagcgtgagaagccagcacacacatatgctctgagactgagaaacatggccctgatcacatggctcccgaggcccacgtggcctctggattttcagttatatgagacaatgtgagttggacttactattacctgcaactgaaagcaacctaatacagtcatgtcacttaatgacgaggatacaccctgagaaaagcagtcaggtgatctcgtcgttgtgtgaacatcatggagtgcacttacacagacctagatggcctaccctaccgcacacctaggctagatggggtagcctgttgctcctaggctacaaacctgtgcagcttgtcaccgtactggatactgtaggcaactggaacacagtggtaagtatttgtgaatctaaacatggaaaaggtacagtaaaaatacagtattatgatctcacgggaccactgtcgtacatgcattctgttgttaaccaaaacatgatgtggcgtgactatatacaaaactctaccaccaattagccccaagaccaaggctttacctgctgcttaaaaagtgctgaccactcttgcctcatctgcccaaacaataacccctaagacagtccctcctgttctaccgcctctcatttgatccttgactcaccttgtaaggtgggtgaagcaggcgtattacctgccttttacaactggagaaacaggttggagagcttacgtaaatcacccaaggtttcccagctgtcaagtggtggtgcctgagcccgagcccgtatctgctgcctccaaagcccatgcccttccaccaccgcaggcctctgaaggaaggtgagaggtctcggggaatagggggcactggtgaaacatgcttggtttacctctaggctggatggctgaggccctgaataccagctgccatctgtcactaggtcagggatggtgacagcaaatagggcaggcccctcacccttctaatgaggtctccacttgccaccaagtgtgtggccacaccagtgcagtgtgatgccgtgtggctcagtgaggccgtgatgagtccgtcttcccaggagctgacctgacagcagccagctttctccaacctggcccaggcacatctaacaggttcctgcacatcctcacactttcctgcagtaaccctccttgcctctgttttccaccagctggggaactggggccaggtggcctcacgttcctccctcccgcttctctggcacatccaagaacaaaaccaggcagggcagggacagggcgctcatcattagcccagcttaatggaaactttcccttgccctctgctccccctgaggaaatacagcgcttacaaaataacaataagaaaaatgcatggccgggtgtggtggctcacgcctgtaatcccaacactttgggaggccaagacaggcagatcacctaaggttgggagttcatgaccagcctgaccaacatggagaaaccccgtctctactaaaaatacaaaattagccgcgcatggtggtgcatacctgtaatcctagctactcgggaggcttagaggcttaggtaggagaatcgcttgaacccaggaggcagaggttgtggtgagctgagattgcacccttgcactccagccttggcaacaagagtgaaattccatctcaaaaaaaaaaaaaaaaacaatgtattttttagttcgggtgtgatggctcatgactgtaatcccaacactttgggaggccaaggctggaagatcacttgaactcaggagtttgagaccagcctgagcgacatagccacactctgtctctacaaaaattaaaaaaaaaaaaaaaaattagtcggatgcggtggcacacacctgtgctcacagctacttgggaggctaagatggggggtcacttgagcctgagaagtaaaggctgcagtaagccatgattatgccactgtactccagcctggatgacacagcaagaccctgtcttaaaaaaaaaaaaaaagcattttaaaaaataaacattttggaatagtttgagattgacagaaaaattgcaaagatagtacacagagttcccacagacccattagtcagttttccctattaacatcttccactaataggtggcatttgccataatgaatgaaccaattttgatacattactaaagaaagtccataccttatttgaattcccctagtttttacctaatggcctttttctgtcccaagatcccacccaggacactacattacactgagctgtcatgtctcatgtctccttagactcctcttggttttgacggtttctcattctttccttgtttttgatgactttgacagttttgaaaagtatggccaggtattttgtagaacatccctcaggtgggatttgtttgatgttatccttatgactagatgggtttatgtttttttttttttttccaagagacagtgtcttgctctgtcgcccaggctagagtacagtggatcatggctcactgcagcctcaacctcctgggctcaagcaatcctcctggtcagcttcctgagtaggtgggaccacaggcacacaccaccatgtgcagctaattacatttttttttttttttttttggtagaggcaggctcttgctatgttgcccaggctggtcttgaactgctagacttaagcaatcatcctcccttggcctcccaaagtgctatgattacaggcatgagccaccgtgcccagaccatgcgtaacagttttttggaggaaggccacagaggtaaagtaccattctcatcacacatcaaggatacatactatcaacctgcttcatcatgtttatgctgatgttacccttcatcgcctggctgaggtagtttgtcaggttcctccataaggttactttttgtccctttcttgaatgtgtcctttagaaggtagctactatatgcagtccacgcttaagaagtggggaggtggctcacgcctgtaatcccagcactttggcaggctgaggcaggtggatcacttgaggtcaggagttcgagaccagcctggccaacatgatgaaaccccatagcaactaaaaacacaaaaattagcctggtgtggtggcatacacctgtaatctcagctactcgagaagctgaggcaggagaatcgcttgaacctgggaggcagaggttgcagtgagctgagattgtgccactgcactccaacctgggcgacagcgtgagactctgtctcaaaacaacaaacagaagtggggagttatgctccatatgtttgaaggcagagcacctgcataaactacccggaattctacatgggagatgtttattctcaatttattcaaccatttctttcactatggactcgtttattttatacttcatattatgttccaatgctacattatttattttgttgctcaaattgttgcagttttggcctttgggagct

SEQ ID NO: 96100 - DNA, 34654 bp, Homo sapiens
tgcctaagttggcagctggagctctagtcagagaaaccaagttgagagaagaaagataaaaggcagtctggggcagtggctcacacctgtaatcccagcacttagggaggttgaggcaggtggatcactttaggacaggagttcgagaccagcctggccaacctggtgaaatctcatctctactaaaaatacaaaaattatccgggtgtggtggcatgcgcctgtactcccagttactcaggaggttgaggcgggtgaatctcttgaacccgggaggcagaggttgcagtgagccaagattgtgccactgcactccagcctgggtgacagagtgagaccctgtctcaaagaaagaaagaaagataaaaggcagaagggcaaaaagaaaaaaaaagaaggaaaagctctgtctagctgactcagctcctgtaaagcagccctaccatacaacacttgtgcttatatctcattggccatacccatgcacaaaagagataggaaaatacagacttttgttccagacatcaatatgcccagctaaaatttggagttctgttattaaggaggaaaaggagccaggcatggtgatgagcacctgtagacctaggtactcagcagctgaggcgtgaggatcgcttgagcctaggagttcaagatggcagtgagctgtgatcgtgtcactgcactccagcccaggtgacagaacaagaccctgtcttctctctctcgctcaatttttttttccagaggttacagggtctctctctgtcacccaggctggagtgcagtggggcaagcatagctcactgcagcctcaagcacctgggctcaagtgacgctcccacctcagccttccacgtatatggaaagtatctggaaccacacacacacaccaccacacccagctaatttttttattatttgtagagctgagatttcactatgttacctaggctgatcttgaactcctgggctcaagggatcctcccgcctcggcctcccaaagtgctgggattacaggtgtgagccacagcgccagcctcctgactcttaattgaaaagggagaaagggagaatggttgttggataagcaattagcattctttacaacaaaatcttcttttacttcctcattaatgataaacttattgaatgcctattgtatactatgcaaggtgtttcagattttctgtttgtttgttttacagatggggtctcagtctgtcacccaggctggagtgcagtggcacaatcatagctcaatgcaacctcaaatgcctgggctcaagcgaccctcccgcctcagcctcccaagtagctgggactataggcacatgccaccatgcctgacttgtttcagattttgtacttgtattagaagagctggttgaggagtgtatcagttagaatgctttcagctacaagtaacacaaagctcaaaaaagtagattaaacaatgaggaagcatgtcatttcaaataagaagtccagaagtcaaccagctccacagttggctaatacagtgactctataatgtcatcaagggcccaggttctttccttctctccactttccccaccttcggtgtgctggttctgttctccaaaagttcccttcatggttaaaaaacaactacagcagtttccttttcatatcctaagatgaaaacatgaagaaaaagataagggattttgcggggaggaaggaaatagctcactcacgcagctacattcagctagtaggctggctgaagggtctgggatggcctcacttgtatatctggggtcttggcaggatatacttgtaagtatgagacttctctctccacattgtctcttgtcattcagcgctctagaggaaacttctcttttttctgtctttttagacacagagtcttgctctgtcgctcaggttggagtgcaatggtgccatcttgggtcactgcaacctccgcctcctgggttcaagccattctcctgcctcaggctctcgagtagctgtgattacaggcgcccaccatcacacctggctaattttttgtatttttagtagagacggggtttcaccatgttggccaggctgatctcgagttcctgacctcaagtgatctgcccacctcagccccgcaaagtgctgagattacaggcgtcagccactgtgcccagcctgtaaataccatttttaagactacaacctccacctccccaattcaagcgattctcctgcctcagcctcctgagtagctacaggcatgcgccatcacgcccagctaatttttttgtatttttaggagagacggggtttcatcatgttagccagactatttctattaggcccggcctatttatattattattacaccgtaatatataatgaaggccagatgcggtggccatgtaatcctagcactttgggaggccaaggtgggtggatcacttgaggtcaggagttcaaaaccagcctggctaataatggcaaaagccagtctctactaaaaaatataaaaattagcgtcatgtcgcatgcttgtaatcccagccactcagaaggctgaggcaggagaattgcttgaacccaggaggcagaagttgcagtgaaccaagatcgcgccattgcactccagcctgggcgacagagtgagactctgtctctaaaaaaaaacaaaaaacaaaaaaagctacataggcctctcacaatttgcccacaaagaaattccttgtgggcctccaagatctttacactaaaacagttccgttgaatttcaccccgacaatgtacactgatggtttaccatcacaagcacaggacaaaggacaaaactaaaaagtcatccctctgctcgcctgaaacaaacacatagctgactgctgcctctgctctatgattattttatcttaygtgaaaatgcagattatctgagcgtgagcagaaagcatcagtgaagactatcaaagacccagaagaggacacggacacatggagcgggggaacaacacatactggggcctgttgggggtcggcggagggagagcatcgagaagaatagctaacggatgctgggcctaataccgaggcaaggggttgatctgtgcaacaaaccaccatgacacacgttttcttgtgtaacaaacttgtatatcctgaacatgtaccccagaattaaaataaaagttgatgacaaaggccaggcaaggtggctcacgcctgtaatcccagcactttgggaggccgaagcaggcagatcacctgaattcaggagtttcagaccagcctggccaacatggtgaaaccctgtctctattaaaaatgcaaaaattagccaggtgtggtggcgtatgcctgtaatcccaactactcaggaagctgaggcaggagaatcgcttgaaaccaagaggcggaggttgcagtgagccaactgcactccagcctgggcgacagagcgagactctgtctcaaaaaacaaaagccgttgagatgtcagttggcccagaaacacaaagggacagtcacagactcactggacaagggtatggcgtggtcgaatggctaaaaggtcaggcactgtgccaggtaggcactgggtcacggtggtgaacaagtaagttcctgcactcacagattttacgctctaggagggagacaaaaagtgtttatgtcaagcagttactaattcaaatgaaagcaaagaaaaatggaaaagagagaatgcatgtgtacttgtgaaggaggagagtatgcaggttatgcagtgttgcattgggttctggggaggcctccctgattgagtgacatgtgagcacagacctaaactgaggtatctagccttgctgacatagagtaaagagcgagtgcaaaggccctgaggccgagtgtggctagagtagaacaaggaggaaagacagaagagggctgcatcctcaagggcttgtaggccactgtaaggcctttgtcttttctttcaagtggaaacctctggaaaattttaagtaaagtgacataataaaaggacccctatgactgcagtgtgaagaataaattcagagtgagcaaggacaggagcaggcagattaaaaagaggcgagcgcagtcatccaggcaagagatgatgaggattggggcaggttaacagtgtaaataaaagaacatgacccaggccggtgcggtggctcacgcctgtaatcccagcactttggcaggtcgacacgggtggatcacgaggtcaggagttcaagaccagcctggccaagatggtgaaaccccagctaaactacaaatattagccaagtgcgagggcaagcacctgtgatcccagctacacgggaggctgaggcaggagaattgcctgaacccgggcggcagaggttgcagtgagccgagattgtgccactgcactccagacaaaaaaaagaaaaagaatatgacccaggcgagtctcaatcactttaagaggttcacttgccaatgttaagaacgtacttggggaaaaagaacacataaccacagaaaaatcagtggtccatgttttttttctttttgaagctccttttcttatgctatgttcccaaaaatttgggaaacaaacactcagcacccacactgaggggccaaatctccccgcttctacccatctgttgaattgagacgttagatgggcccgtctcgagggccctaacagctcaacagtcgtgtgacgccatttggccaagcttgcggggcttcaaaatgcagtttgagacgacaggaagcaggtaaggagagggaagccagtctggaaggaattgagcggagaacgtggactagcctggttaaacacttgtccttagccttcgccctttctgtgtctaaagaccatcgctctgaaaccttgttctcctgagagtgctggggtcttctccgggccttctgaggagcgccgttcaacggcagcaaagggcccacggagtccactggggctccaagcaattttttttttgagacggattcttgccccgtcgtccaggatggagtgcagtggcacgttctcggctcactgcgacctccgactcccgggttcaagcgattctcctgcctcagcctcccaagtagctgggactacaggcacccgccaccatgtcctgctaatttttgtatttttcgtagagacggggttttgccattttggccaggctggtctcgaactccgggactcaggtgatcctcccgcctcggcctcccaaagtgttagtattacaagcgtgagccaccatgcctggcctccaagcacattttgtttctgtattagcaacagctgtgctcggccagggacggtaaaaatatacggttcagaaaatgcacctcagtgtgaaccaaatgtagctgagggcactttaacctggaagggacatcgccacctcacaaactccggaaagaaagggacacggctcttccatcatggctgccggagacagagcagcgaaaggcaacggaaaggaaatggcgccggggcccgccgccattctcagcgggcccagggcggtggggcgagagggctggcggcgccatataggaaggccagccacggaatttaagaccctcccggcctctggcgccagaggactctgaaacttgataacaatatggaggacggttattgtctctgcaaagcaacttcttcaagccggccgcggggtctgtaccgagatcggaatcaggcaaaatcctctattctctaaacagaatgcgttacgcatactgcgcatcttagcaacagcaggccggctaacgacgcaaagaatgttacgtcgcaccagaggcgcttcctcccacctcatcccacgttctagttcgggtggcgcgagaactctacgctcgctccgtactttgtttttcttgtacagaccgcaaaatacacccatcgtcgcaactgacgtaaagtgcttccaagaatacccgtagttccccgcggagccctcgggctattccgaggcgctgtttacgtatcgtctccgccgtacgcagcgttaagttggagccgactcagcggcggccgccattttgtgcagtcgctgggaaggaaggagacgcctaaaccgcggcactgcccggtttgagcgtagccaaacctgcccaccggctttgtagccccgattctctgtgttttgctcccgtctccgacgagagaggcggcgacggtggcgtctgcgacgggagacagcgcgtcggagcgagagagcgctgcgcctgccgccgccccaacagcggaggcgccgccgccatcggtcgtcaccagaccggagccgcaggccctcccgagcccggccatccgtgccccgctcccagatctctatccttttgggaccatgcgcggaggaggctttggggaccgggaccgggatcgtgaccgtggagggtaagggtgggggaggagaggagaggcctggcgtgggggtgggggagttgcttcttggggaggcccggcggactgcgagcctgggagccttgctctcgacccgggaggcgaggggaggcgactcgaggcgagacagcggtttcgtgcgcggacctcggccccggggtcactcgggacccgaggagggcggccgcttggcgacgctgggcctctccgtgcggacggccgtcgtggcgcggcccggccccatcccagccccgcgggggatcgggaggggcggcctggccgcatcagcccaggcccgggctttggcgcctcgcctggtttcccggctctcgagccgggccgcttygggcgggctgttcgatgtctccaggcctcggcgttcatctgaaaaacgcggatcttcctgagagaacacttcagcccrggaaagccttacacgaaatggcacccttgacgttctctccccagagttcactgtttaaggcacgggagacgaaaagaccaacttctcatttttagaaatagattttaattctcttcagttatattttaagtcggaggaaatgcattgggatgtaaagcagtggagttgcttgccatctaaatgaccgtgtttgggggaaggatgggtttttgggtcgttactttagttttaatcttaatatttcagccttttttctctaattggactgcagcgtcaactattctgcctcgctagaaagttcttggtattgtggaccgggcgtggtgcctcaggcctgtaatcccagcgatttgggaggccgaggcgggcggatcaccggaggtcaggagttcgagaccagcctgatcaacatggagaaatcccgtttctacyaaaaataacaaaattagcctggcttggtggcgcatgcctgtaatcccagctactcgggaggccaaggcaggagaatcgcttgaacccggggggaggaggttgcagtgagccgagatcgcgccattgcactccagcccgtggcaagagcgaaactccgtctcccccgacccccccgcttccccaaagagttacgtgacgccacttgatatgtgtgtgtgtgaccttggtcaagatcctaccttttgtgagcctgtttcctctgaggaacgtgataattgcctttactttgctgtgttgtcaggaattaagagataatggatgtaatagtctcactgtagtaggcgctctgttaacgatattttctccaaacgtttttgtcttttgtggttcagatccacaactgctggatttactagtctcaagcacttcagttgccactttttacaaaattattttgatttataccttattaggaaggaaaatattttatctcattgtttagaggatgagaggtggaatgtttgcttcgcgtgtgacagtattgctaagtttagaagtgaatttcagttcattgacttagaaaaagaacttgagattatctaggaaagttgaaaacgacccagcaattcctccctaagctttataccctagactgtaatgcctagagaaatccttgcacaggtaccccaggatccttgtacagaaaagtttatataccagcattcgtgctaacaggatattggaaacaacgcaaatgtctccataaattgtgggtattcgtacaattgaatcagccgtgaaaaagagaaaagaacttggattaatgtggataagtcacagaagtgttgagttaaaaagcacgttgtggtagggtgacacatttaattaaggatatgtgcaaatatgataggaaagggagtggttaacaaaattcaaggtagtggttattagggtgaaagttgtaagcttgaaataggcacatagaggggctacaagttactaatagtgttctatttctttaccattggtgtttggtttaatatttcctttcaccatatatatgctttaataagttatttgaaaggaaaaaagtgaattactgatccatactttgagtatcagatgacattttttaaaaatttcaaacgaactagccttctttcataagatctgtgccccaactctccctttcccaagaaatgttcttgattatttgaattgctgttgtttyaactgagtgttacacagttgaagtggtggttattttgaaaaaggaataggtgaggtcagttcatgtatttcacatgtgtgatgcaaaaatgataggcattgtacatttgaagtagtatggtttttaatgttaatatatgacttcaaaggtgaatttttttgyaaagccaaattaaactaattactgaccggataaaaacatttgagcagcatagtataccagagagtacagtgtgcgtatttaaagatggcatggatatgctcaaaagtaaaaggctttcttgaattttgaggtcattaattatgtcagcattaattataaacatggaagacggcatattttccaagaaccacatgtttcaaattaaatgtttagtgtagaatagaatgtcttgaataaatagccagggaagtaaggagagaggaaaaaaaaatacatgaatgataatcatcagtttaaagccttaacaggaatcttactttcaagttttattttttcctaagtcactaaggtttgggtagcattgcaatgtggcaataacaatgaagtcttttataatttgcaagagtgataatccaaagactttctacctcttgaaaagtaccttatttagctgcttcatttgcaagtgtggcgggagcggcaattgaggtggccttttggtctgttcagtattgagtcttaagctgaggggcatattaaatatgtcgctgacacgggtatccctatgctatgtgctcttcctgttctgattcttaatttgtcttcactgtctcagtagtggtataaatggaattagccaagttctgcctgttgagtgtaggtatccagtgatcccaataaaatctcctgccatcaatttttgttacgtatgtatttagaggaatgtctrgctggttaagccagagttctaatggctttgaattgcaggaaattgaggccctgtagaataatacacctacttgcctatcaatgataaagtggaactttatataagatgaagttacaagtgggttagagtgggaaaagggaactaaattcagtacartattttacaaggagtaaagaaactgagaaaatgctatacagtttgtatgccaaacaaagacctgtactttacaagatcgaaatagggaaaattaaggccatcttagtgttaagattcttctaggaaaagtagcttctgatttcttaaatattagctttggctagtggtcatatttgtattcctcttgagcttgtctgttgtgaaaggtatataaaaagcaagaagttgatcttaagtaattagttgagtgttaaagccttaaataagtcttgttagtgtttttttctctgtaaattaataataccatttgggaacaagaaggagatagaaggtaaaagtagagatcaaagaagaaggaaaggtcataaatctatgttcagcttttttttttttttttttgacggaccctccctctgtctaccaggctggagtgctatggtgccatttcagctcactgcaacctccgccttccgagttccagcggttctcctgcctcagcctcccaagtagctagggattacaggcgtgcaccaccacgcctggctactcttttgtgtttttagtaagagacagggtttcactatattggccaggctggtctcaaactcctgacctcaagtgatccactggcctccgcctcccaaagtgctgggattacaggactgagccactgcccccggcaggctcagctcttttattagcgtaagctaaaaatgaagaccagtctaccagtcctttccaagacccagttttgctttgcagatragcagacaggtggagtgcttatcacagtttaataggggagcaggcccaagaagctattctaagattgagggacttgcttggagtgtatcttccttcttgtccacaatcttccctttaattgaaacttaacttaatgtcatcctttgcctgcatgtctgttacacaaaaatagagacttgtgtctgttttgtttagtaactccagcacagcaccacttcaaacagtagccgatacatacttggtacctagtaacttggtacctaataactatttgttgaatgaaatgatgctaacttgtactgagtgctggctatgccagatacttttatagtacattacacattattaggtcattttctcagcagcctctgaaataagtggtattatttctactttgcataggaaactaaggtgtgtggaagttaaataattctcttcaaattatacagtaagtggcagaataaaaactcaaaccatgtctggatccagaatctgtgattgtaatccctaggatgtatttctctcaataaagggatttttaattttttgcctattgtagctatattcataaacagtatttattgttgggtagtaagggaggttttacacatttctccatacctttaaatcacagcaaataaaatggtctttttggaggtaggctggtagtatccctagaactccatcctttttgaatattcttatggcatgtacgatacgttgctttaaaaatactgatgaactaactaaaaattctgttcctagatttggagcaagaggtggtggtggccttcccccgaagaaatttggtaatcctggggagcgtttgcgtaaaaaaaagtgggatttgagtgagctccccaagtttgagaaaaatttttatgtggaacatccggaagtagcaaggctgacaccagtaagtttacatgtgtgttttaatgtacagattattgaaccaagtagatatattggttagagtttattcatacgctactgttgccgttttacattttattctagtgtggtgatatttttyttaaaaaattttttggttaattttttttttttttttccyttttgtaragaccgggtttcgtcatgttccccaggctggtcttgaactccctagctcaagcaaactacctgcctcagcttttcaaagtgctaggattacaggsgtgagccactgcacccagctgatttttttttttttttttttttttttttttgagacggagttttgctcttgttgcccaggctagagtgcaatggtgtgatcttggctcactgcaacctccgcctcctgggttcaagcgattctactgcctcagcctcccargtagctgggatcacaggcacccgccaccatgcccggctaattttttgtatttttagcagagatggagtttcactatgttgggcaggctggtctcaaactccggacctcggacctcaggtgatcgacctgcctcagcctctcaaagtgctgggattacaggcgtgagccaccacgcccagcctctttttatttttgagacggaatcttgctctgtcacccaggctggagtgcaagagtcagggtttcaccatgttgatcagactggtctccgtctcctgaccttgtgatctgcccgcctcagcctcccaaagtgctgggattatgggtgtgagccaccatgcccagcctttcttacattcttatctaagacccctaatactcataaaaggggaccagtttaaatatgcatttaatttgttctcttgttgataatgcttactaatctgtttattatacatgattgaaatattgtatattaggtcatgttttttcatctgttagtgaaaaagatagattggctttttttttttttttgaggtgaagtctcactctgtcccctaggctagagtgctgtggcatgatcttggctcactgcaacctctgcctcccaggttcaagcaattctcccacctcagcctcccgagtagctgggattacagacatgtgccaccacgcctggttcatttattatttattttttttttttcagtagagacggagtttcaccatgttggccaggctggtctcaaactcctgacctcaagtgatccacccacctcagcctcccaaagtgctgggattacaggtgggagccaccgtgcccagccaacattgtctcttcttgtacctcattaccattgttttttggactctacacatgaaatggttactctttcagaagaaagtgtaatggaaagagtacttgggtccaagttccacttttttttccttctcattctgaccttgagcaagttacttatcttttttctcctatagaaaatggaactcttaatcacctacatcattaattaacttacaaagtaagtaggagccttgcagagttaaagtgatacacatgaaagtaccatgtaaactattaaatatttgccaacatagctgtggactggataattgctcagctagcttggaacataaattctgaatgtttagaataactagtttactaacttctttcattttttttcaatagtatgaggttgatgagctacgccgaaagaaggagattacagtgagggggggagatgtttgtcctaaacccgtgtttgccttccatcatgctaacttcccacgtaagtgttcttcaatctagaaccttaatttgttaaattgggttgaatgggagacaagggtagtaggttaaactctttgagccaggcttggggttttgttgaaaggacaagagattgtttttatggtcatcagttctgttctagtatttagactgaggttttgtttttgttttgtttttttgaggtttttgtctttttctagggttttgccctctgccttttagaaaacagcagaatgaaattgctttctagctggatataatgtgaatttgctaaacaataaatgactaccatgttcccatgtcctgttagatgctttagggtaatggtttttcaaatttctgggagaggtagactattgtagcagcttttgtttgtttgtttttggaaacggagtctcaacgttgtcacccaggctgaagtgcagtggcgcgatctcagctcactacctcctcygcctcctgggttcatgcgattctgcttcaccctcccgagtagctggaattacaagggcccaccaccactctggctaatttttgtatttttagtagagacagggttcaccatgttgaccaggctggtctggaactcctggcctccactggcctcagcctcccaaagtgatgggattacaggcgtgagccacctagcctggcccttagaagctaacagtgagttggtcggagatctagtagataaagaaaaagcactttggagagatgaagctgggtaaatcttatcttcagtgagcttaaaagtttttttaaaaactcttggtttgtgtctttaaacacaataaaatacgcaaaataaaattctcttacagaatatgtaatggatgtgttgatggatcagcactttacagaaccaactccaattcagtgccagggatttccgttggctcttagtggccgggatatggtgggcattgctcagactggctctgggaagacgttggcggtatgtatgagcaagagaagatccttgatattgtggtaacttattttgctattctagttgtcatacgttctcagttcttcgtagaagtgccattcagatagttagatactattttagttattaaatatatggaagcattttatgttcaaatttgtattgcttcctgtatatagcagtggtaagttctgtttttcactttcctatttatgcattaattcagtaattactaagtatctaagtaagattgtacttctaagcgtaaggttgtcattctttcccccctccacagtatctcctgcctgcaattgttcatattaaccaccagccatacttggaaaggggagatggcccaatcgtaagtgtgtttcagtttctttgtaattctaagaaaaactacaatttagcgactatttaggcttggtgctttacattatccatttgtactcttaaccacaccctccataggtggaaatggtttcattctcatcttacttggaattaaatgacttacccaagatcactcagcaattgaatagctgagcttacatttgaaccaaagtcttactcttaaagaaaccatgcatgctgtatgggcatttactgtgcagtaaatcaagtgttttctggttttggtgtggttttttttgtttttttgttttgattttttgtgtttttttgagatggaggttcgctccgtgttggtcaggctggtctcaaactcctgacctgaggtgatcagcccaccttgccctcccaaattgctgggattacaggcatgagccactgcgtccagccttctttcttttttttttttttttttggagatatattctcactcttgttgcccaggctggagtgcagtagcgagatctcagctcactgcaacctccgcctgccaggttcaagccattctcctgcctcagcctcccgagtagctgggattaaaggcgtgcaccaccactcccagctaatgtttgtatttttagtagagacaggtttgcaccatgttggccaggctggtctggaactcctgacctcaggtgatctgcctgcctcggcctccccaaggtgctgggattacaggtgtgagccaccgcgcctggcattgaatgtgtactttttttttttttttttttttttttgagatggagtttcgctcttggttgcccacgctggagtacattggcacaatctcggctcattgcaacctccacctcctggcttcaagcgattctcctgtctcrgcttcccaagcagctgggattacaggcatgcgccgccacacccagctaatttttgtakttttagtagagacggggtttcaccatgttggccagactggtctcgaactcctgacctcaggtgatctgcctcggcctcccaaaataatgggattacaggtgtgagccaccacgcccggcctacttaacttttttaagaaataagcttgcatttgtcctatatatttatgaacatgtacaatatgtctcaagatattcacaaaaagaaataatgcagtacttataatacatagtatatgtctgacagcattattattagttgatatctaatggatcagtatataaagcaagtttcataatttaatttgaatggtatatgataccttgatttttgtattatttggccagattgtacacagtcttgtcagattacatgtaaattttcattgtttttgccttatctacctggtgatgtgcttaaattagaggtcaggaatgtgtcattctgccagtttaagtcaggatgaccatccaaaattccaaattttaggccaggcayggtggctcacacctgtaatcccagcactttgggaggccaaagtgggcagatcacatgaagtcaggagttcgagactagcctggccaacatggggaaacccccatctctacaaaaatacaataattagctgggcatggtggtgcctgcctctagtcccagctactcaggaggctgaggcgcaggagaatcatttgaacccaggaagcagaggttacagtgagccttcattgcaccactgcactccagcctgggcgatagagtgagactttgtctcagaaaacaaaacaaatccaaattttgaggaccaatatgatcctcaaagtaaatgcttgctggagcattttggttttgggggtttaggatgctcaacctgtaaatgagagttgtatacttaaaaccaggtaatacaatctatatctccacttaaacagtatatataaactataatgattgataatgtgtcatagtaaaagtgacgaggataccagtatcattccaaatgctaaacatgaagttctaataatttttttctatattccattgtgctaatattccccacttctgatcttcaccccatcacttttaatgtgctagattagacagcaaagaattaaattagctttttgtattttgtttcttctttttttttttttttttttttaaaccttggatgaggtctcaagtgtctttttgttggtttcagtgtctagttctggctcctaccagagagcttgcccagcaagtacagcaggtggccgatgactatggcaaatgttctagattgaagagtacttgtatttatggaggtgctcctaaaggtccccagattcgagacttggaaagaggtaataatatatagtgtaaaagaattgttagtttatcttactttaccaattcctgtggaggaaattggagaaaaaaagtgggttcttgtgataaactcagaatttcagcagcttagaaattctcagatgtgactaaaacagctattttgagagagaaggttcagcatggctggaaactttgtgaggatttggtgattgtacataagtcctgacatggttttgcggttactttgttaaaatttagcttctctgggccagtgcggtggctcaygcctgtaatcccagcactttgggaggccgaggtgggcggatcacgaggtccagagattgggaccatcctggctaacatggtgaaaccccgtctcyactaaaaatacgaaaaattagccaggcgtggtggcaggtgcctgcagtcccagctactggggaggctgaggcaggagaatggcgtgaacctgggagtcggagcttgcagtgagccgagatcgtgccactgcattccagtctgggtgacagagcaagactccatctcaaaaaaaaaaaaaaaaaaatagcttctctgcagcattgagtacagccaccagggctgctgctgctgcatttttgtagagtcggggtcttgctatgttgaccaggctggttgtgaactggcctcaagcgatcttcccgcctcctcttcccaaagtgctagaacacagctgtgagccactgcacctagtcgattggctcgatcattggttttgttttacaggtgttgagatctgcatagccactcctggacgtctgatagatttcctggagtcaggaaagacaaatcttcgccgatgtacttaccttgtattggacgaagctgacagaatgcttgatatggggtttgaaccccagatccgtaaaattgttgaccaaatcagggtgtgtaaagctaataataagcagtctttatgccatttgtccaagttccttagcctgaaagaaagcctttccttttttgatagcctgataggcagacactgatgtggagtgcaacctggccaaaagaagtaagacagcttgcagaggatttccttcgtgattacacccagatcaacgtaggcaatctggagttgagtgccaaccacaacatcctccagatagtggatgtctgcatggaaagtgaaaaagaccacaagtatgaaagatattttactctgatttgataatgctgataaaccttttctaataaccctccaaaattagtactgtagaaaccagtatattttgaggcctgagaacattaaaagcattgctaggtttctgataatccatcatcatatcatttgtcagagcattatggttaaatgcaaggattctgaattcttgagtttgaaatttagctctgctgattacaagctgtataattttgcacaattttgtgtcttggtgctgcagtttcttcatctgtgaaatgggagtaataccacttacatgagacttgctgtgaggatggtatgagttagtatttcttgagcacatagcagaacctgactcagtactctaatagttattaaaaattttaaaagcgtaatgtgcaaagaaagtactgtagccttgggagttgatattgcagacataatcgtccacataataactttctgtgtgatgactgcattgttggtcatgttttcaggttgatccaactaatggaagaaataatggctgaaaaggaaaacaaaacaataatatttgtggagacaaagagacgctgtgatgatctgactcgaaggatgcgcagagatgggtgagtatagcaccaaggcaattaacctctggttttatagttaactggaaatttctaaattggtattccaaatgttgtgtaatatttcaataatgcctatccatgcagtttgctcttttaatgagcacagtcatctattcatgaagcctgacaaaccttacaaaaattgcatgatagcatttggctttaaagttcgattttctccactttaaaagatttttaaaatattggtcacttttcttctgatagttggccagctatgtgtatccatggagacaagagtcaaccagaaagagattgggtacttaatggtaagtttaaaactaagcattttctgttgattccccaccccctgcccataagtgaatrttcatgctctatttcagggataggcaaactttctgtaaagggccacatagtaagtatgcttggctttgtaaaccaaatggtggtctctgttatagccactcagcactgctgttttaggacaaaagctgtaggctgtagataatatgtaaagaagtggcctggactgggcaccgttggtggctcatgcctataatcctaacactttgggaggctgaggcgcgtggatcacctaggcccaggagttcaagaccggtctgggcaacatagtgaaatcctgtctctaaaagaaaaacaaaacaaaacaaaacttagccaagcttggtggtgcacgcctgtaaccccagcgactccggagattgaggtgggaggattgcttgagtctaggagacaggttggagtgagccaagatcgtgccactccagcctgggtgacagggtgggaccctgtctcaaagagataaacgtggctatgttcagacaatatttatttgcaaaaataggcgttgtgccagatttggcccaaaggccagtttgtcttacccctgttstatagttgattgaattactgagggtacttttagcgtgtgctcatggttctttaagggccacgatgctggctctttaaactttttcacaactttcaccaccctccctttattaataaagtcttcaattttttccttctgattataaaaatataactaccgtttggggagaattaaactgttactgaaatatttaaagaaaaatgtttcttaatgagtcatattttagcatatttcctttcagtcctttttttcaggactactcttaagggaagccattgagaaatggaagaggccatattttgtttaagaaataaaatgtggccggacacagtggctcacgcctgtaatcccagcactttgggaggctgaggtgggcggatcacctgaggttgggagttcgagaccagcctgaccaacatggagaaaccccgtctctactaaaaatacaaaattagccgggcatggtggcatatgcctgtaatcccagctatttgggagactgaggcaggagaatcgcttgaacccgggaggtggaggttgcggtgagctgagattgcgccactgcactccagcctcggcaataagagcgaaactccatctcaaaaaaaagaaagaaaaataaataatatgcataccttttggggggaaattcagttcttttcattctacatcttttgaacttgtttcctactgacccccaacttttggttgtgtctcatttgggaaataactttaaggggaaaaaaatctagctcatattaattatgtaacaaattgccacactctcttaacggtatttcattattagtagaggtaactattgtgctgctgaatatgagtgtaataaagattttcaaaagaatcactgtcagtcattacaagagcttgggattttctggcaccattatttgaaattttaacatggttatgtaaacagatcagatagcaaggaatgcttatttgatgatgattattgtttgtttttacagagttccgttctggaaaggcacccatccttattgctacagatgtagcctcccgtgggctaggtttgtatagataggtgtctctgtcaatggtatatgtatcttttggtttaaagattcgtcatttcaaattcagacttcaagtttagaaagttgtatatacatgtggttagataaatatttgaaagaaaaaaatacaaagcgtgattctccccattccctgccccccccacaattttttttaactttggtttcccccaccccccttttattttcaargtctcttcctgctcctaacaaacaggctttggtctgcagcaaggcctaggcatgactattcaaacagagggagaggagacagacagctgaatggctcagcttctctctggtggtggtttctggctggatagaataagcctgacgaaacctagctattgtaagctagtttcttcagttattcttttccctatccctgtctaagctagatatatacagagaggtccagttttatgaatgcttattagatggaattttataagtctaatgcagtatcagaatagcaaatatgtgtattgcccagtttaatttactgaggtcaaattatcatgggcacttggctatcccctcctacccatgcacttatctgtaggtgtgttatcaactgatgattttctggagtttttgacccattaccatttaagatatacagagaattttatggtagtttagcccactattctgagctaaacaggtctaactcagaacttctatattttaaaaaaaaagattatttgtattacaaggaaatccttaaattattgacaggtatttaatttgcccagtaaggtgagaagtaccatattattcccttatactatataatataaagagaacaggtattcaaactggaatacaaaagtaatgaagcctttttatgcattgcactcatcattccctccttcagaggtggtgacctgcagccatgatggaaagttctctctgcccctctgccctctgaggtcatgtctggatctgtgccattagaacttgggcctgttgggagaggaggcggaggcctgaaagcagtttacataaagctttcagtaatggttggtttttaaacaggcttgctatgtgctggtagcttctttgtgcatcttgcctagacaattaaaaatatttgctccatgtccccttgcatttctaaaccaaattaattggctaccattagaataacttagactcttcatcccacccccactcatccaagtgaggggagagggaaggtacccgagtctgtttcttgttactcaacatcagtgcttgttttgggcccctttgtttgctgccttgtaaaaaatcaaaagagggagawaacccaccaaaatggcagaattctgaccaatgtcctacaagatcctggaaagtgaaggcttctacctcatagacaggggtgcaattttcagctgagtcaccagggccttttttcacttcctgtcaagcgatggtctcttaaatgttcccttcaggtaagttctttgattcccataattttataatagtcatccttaggctaccacttccctttccactgggatattttttatttttccttttttttgtttgaactacacactgttaaactaaaagtattgaatttattttgttttgttttttaacagaagctttgatatcagctgcagatcactcaatacatggccgagacaaatctacattggccggaagcagctctagatgagcctcttggctagacttagtccctccttattagtgattggcgattcaggccatgtcatagggcctttcagacaaaaggttcttatcccagtcagctggccaaaacattaactttggatttcttaccctgctacagcatcttctagaaaggcagcaagataatattgtggcagtgcacagataacatcagggtagacttgactggagaaaaccaaattctgcgcttgctcctgtgtgcccccatccagctgtgcatgcacacacaggacacctttctagtatgaagaacttgcatcatgtctgccctctattgagcacccccttctagaaatacttccaagtattagcatgtgaactgttgactccaccctggtgctttctgctaggaaagcacacttaacgcatccagtgtagtaattgaacttgttctactgccatggtcatatgcagtgggattgcataaggagcattatcctagctctgaagataccatggagtagaattccccaccccctgtcttacatccaccctggccctgtaaattcttttttcctttgttgcgtcaacgaccctagccggagactcaagctgccccctgtgataagtgccttctcgtctttctggtgtgattcaggactttaggggtcagtaaagaccgaggagcctttattgtaataagaaacagacataatgccccttcttcacaagccctgtaacaacagctaattttttttttttratctcccctttctcccttgaaattaatccagtctgggcaatagatgcagtctgaccctttggatgtaacttacatttttttttattaattatttttttctacaatcaccccaattatccttgggggaggcgttggaggacctgaaatttttacccgaacccaggttctccggcgcttggcaaccaaatggggctacagagaagcatctaagccagttcacagagcgagcgtgtgtggggacttctcactgccacggacccttgatgcatgctccccgcgctccagtggtcccgtgtcagaaggcggagttttcgaaaggaggccgccaaawataaaaggcaaagagacgggatcggctgcagcggtttcccaaaggaggagggagtgtgcatcggtctggtaacaaacagagaatgttttttaattatttmtatcacaraaatctgtgttttatctaggatattttckgaatattctttgtaaaatgcagatttttttccacaaaacagtaggattctttgttatattcttaaaattgtttgtttaagtaggtaaaaatatacattcagctgaaagcattacactaacatttacattttaagccttaggaggttattcagcccaattcccagcagtagagagaatactaaacttgtgtctcaaggtttcatggttttcccacgttctttggctattaatttaatttcccaggtcacgtagacaatcattgataattgaaacaagtcctgagttgaaataaccttgagttgagcaaaaatatcctcattttggcagaagctgggcttggtagtacagtaaaattttagtgtaatgtgctcttgtaattgaaaggggatagataatctggatgtttctgcaaaggaaaataggtgtgtacttaacagctttggctctactcagtttcttaaaaagataagagcaaaaaaagttaaatgttaatcaaaacatttaagtttcctttaaattgtagtaataaaatatatgaagctcctttttttactttgctctgtgactggtttaaaggtaagtttgttatgttgttggtagattttgccaggcttctcccaacagagtagaagtgatttggcctcataacttcacagtggtttaccactttgttctatgttctggttttgtaaaggatagtactggaatttgcgtctgaagaccaatattggtgtaactcctgtcagtatattggtaaaatgtagcagaggcaggagtttggatgtttggatgggattcccttaggattctacagccaataaagatcctatttcctatgcatgtcccaggaatcagtaatcctcttttactctgttgggatgagtctttttttktttctgttcagagtggttactaacttcaccttctttcctcttgctgtcatctgcattcgtgcttcccacctgttgttggcatgtcctttaccttctytttccctgccacatcaacctacacactgactcatcattgacgtggaagatgtggaagatgtcaagtttgtgatcaactatgactatccaaacagctcagaggattatgtgcaccgtattggccgaacagcccgtagcaccaacaagggtaccgcctataccttcttcaccccagggaacctaaaacaggccagagagcttatcaaagtgctggaagaggccaatcaggctatcaatccaaaactgatgcagcttgtggaccacagaggaggcggcggaggcgggggtaagggtaagtcctggagttttccaggtactgccaaggtatctctttacgccttctgtgacttgcttttagttgctgtttttaagaaggctgtaagtatgttgcttaatagcaaaggacactgcctaatgctttttataacctttttcaactaagaaaacgtgaagtttgttgtgatagtcctattagttaagctaaattgtgaatttttttttcttagagactggtctgaggtttggttttgtttgtttgtttgttttgagacggagtcttgctctgtcgcccaggctgaagtgcaatggcgcgatctcagctcattgcaacctctgcctcccaggttcaagtgattctcctgcctcagcctcccaagtagctgggattacaggcacccgccagcacaccctgctaatttttgtatttttagtagaggtggagtttcaccatgttggcctggctggtctcgaactcctgacctctggtgatccacctgtcttggcctcccaaagtgctgagattacaggagtgagccaccaaacctagctgaggctggtctgtggagtttcaccatgttggcctggctggtctcgaactcctgacctctggtgatccacctgtcttggcctcccaaagtgctgagattacaggagtgagccaccaaacctagctgaggctggtctgagttttaatgtggttgctttggcggggcgggggcagagacagtctcactctgttgcccagactggagtgcagtggcacgatctcggctcacttcaacctctgcctcctgggttcaagtgattctcctgcttcagcctcccaagtagctggtactacaggtatgtgccaccatgtccagctaatttttgtattttttgtagagacagggtttcaccatgttggctggtcttgaactgctgacctcaagtgaccctcctgccttgatctcccaaagtgctgggattacgagagtgagccagtgtgcccccggtcatggttgcttttttaatactttcaaaaatgcttagtagtatattaggtttccagttttccatacggagaggtcagtcattttacactgtttagtggtgggtagaaactgagacatagcagttgcatctacagttgcagaatatcctaggatctgggcttcctgactcaaggtttcatattgtaataccgtgtttcttgatcatcctcaagtaaggggcctaaaagggtgaaaaggtctagtgtcctttaatttttactgtgcttttgaatgtgccccattaaagaatcaaattatgagtatatttttacagtactaattgggaggctggccagcataactaaatatcaaggagacatgtttaatacttttgtacccagtagaatttttacattgttatgtttaggtcctatatctgccattaaaaatcttcttgtatcttcccattaggtggtcgttctcgttaccggaccacttcttcagccaacaatcccaatctgatgtatcaggatgagtgtgaccgaaggcttcgaggagtcaaggatggtggccggagagactctgcaagctatcgggatcgtagtgaaaccgatagagctggttatgctaatggcagtggctatggaagtccaaattctgcctttggagcacaagcaggccaatacacctatggtcaaggcacctatggggcagctgcttatggcaccagtagctatacagctcaagaatatggtgctggcacttatggagctagtagcaccacctcaactgggagaagttcacagagctctagccagcagtttagtgggataggccggtctgggcagcagccacagccactgatgtcacaacagtttgcacagcctccrggagctaccaatatgataggttacatggggcagactgcctaccaataccctcctcctcctccccctcctcctccttcacgtaaatgaaaccactcaagtggtagtgactccagcagacttaattacattttaaggaacactgtctttcctttttttttcctcttcgccttttctttttttttccttttttcttttttttttttttaatttttccccccaaccatcgtgatttgtcttttcatgcagattagttagaattcactgccaggtttcttctgcccaccaaaatgatccagtctggaataacattttgtaaaaaaaaaawatatatatatatatatatagctgactggaagagattaatttcttcccccaacttcttgcatgttgaagatatttgagctatttttcatctaaaagagtaaggtattaggcccttttgtgggagccccatgttttgtttttctgagttggtggggagggagggagggggagggctgaattgttttgcagaggaagatggcatctgtgctttaaatttctcattactgggttagaaaacaaagagggaktgccctgcacattttcttttgtgcttttaaatgtttcttaagttggaacaggtttcctcgggcctgttttgactgattgctggagtgcatttgatagttaaaaattactaattggttttatttcccttcacactctgcctccccacttctccccccgttactgaaaaataaccattttagtgtcaggctagaaattgaattgctgagttttgtgtatcctttaaattaaaaaccacaagtgtttattgtagtggttaaactgtagcatctcagcatctgggtggaagctgcctatatttyttcccagtttaactggggaccatctgtgaaattaattttccatccagacagctgctgtgagcaaatgaacataaatgctcgctggaaatttactaaccagtttttatattgacctgcagtgtaaaaagcacatttaattataaacaatatattcaaaatgggcaaattttattttcaaatgcagtgtagagctagattaaaagcaactctttgccacctactctgcccttttggcaaagttaccttgaacaaagaatcttaagggtttattaagaactctttattttcttcataccctgttctctgcagtgctttctaacagcttctgggtgcagattttcttcggcatccttttgcactcagcttattacaggtaggtagtgcttaagaaaagtcatggaggactaaagcctaagtccttttcacttttcctccatctgaaggtaggtgagttcatcctcttcatrgtaatgctgttttaccaagactttatagcagatggacccagaaagaattttctgctattgtgttcactacaacaggatagggacatcagacagccccagaaaccccttccagatctgatatgggactattaatttttatgctgttaattggtattcattcacaatgcagttgaagggggaaggctccactgcattctttggctaaggcctgaatgcttgctcatctgtaagatctatactcgaggttttgttttccttttaaaattctttagggagagagggatggtttctgaggggttctgaaagtatgattcaatgtgcaacatacaggtaggtcttcagcataagctgaaatatatgcatgtaaaaactttgacatctttttttttaattttccactttcttcttaactttacttctctttttgtcccccccccatcttacagaagttgaggccaagggagaatggtaggcacagaagaaacatggcaaactgctctgtgctttcaaaccaaagtgttccccccaaccccaaatttgtctaagcactggccagtctgttgtgggcattgttttctacaaccaaattctgggtttttttcttctttctttaaacatagaggtaccaccacaagggatgccctactctctcgcagctcttgaaagcatctgtttgagggaaaggtctctgggcaagcaagtggttatttggattgcttgcttccctttttccacctgggacattgyaatcataaaataacagtaaattccaaacctcaaaaactattatggcctgagcacagctgaaatctagcagagtttaactcttctgcctccatgtctgtcacttataattcaggttctgctgttggcttcagaacatgagcagaagaatcgttttatgctagttattgcattcatggttgaaactcaacttagggaaagggttccaatgtattaagcaatgggctgcttctccccaatcctccctaacaattygttgtgtggacttctcatctaaaaggttagtggcttttgcttgggatcagtgctctctattgatgttcttgctggtctccagacacattcctgttgcattaagacttgaragacttgtaratgtgtgatgttcaggcacaggatgctgaaagctatgttactattcttagtttgtaaattgtccttttgataccatcatcttgttttctttttgtaggtataaataaaaacactgttgacaataaggtgtgagcttttattgcttaattctctgaataattcaacgtagacgtcttaaaacagtttttgtttcaagacaaagatgggggatattggattgactgattactttcgcacctaaaactgaaaggaaaaaacttaatacaagaattggaattgaaaaccctagcaggatacctagtaggtaagggtttggatatatctgtatctgctcataagtaaaacagtgattgtgcaaatggtactcgcctaagtaccattaggttattggtattaaggtactaagtacaaggcaggtatcagccactggtttgaaaaaattcaaaccagtaaaagatgagtcacaaaactcctccagccaaacctggtaaatttggtttgcttctggcctgaaggcagtgtgaaagtgaaataagtttcacacttaaaactagctgacacctttatatcttgaccacctaaatttggtcatctacctggaaagtggaaattcacaagaacgtaccctaatattttaactggtctttagttgggacattctaagaggagggacattgttccagattggggttgacttgctcatcatgagtcttgccctcaggccttggagaacaatcatttatgttttttatttcgtcggtaagacaccttaaggtttcttgttgcagtgaggcaccatctttgtgcagttggccgaggttttttatgaccttacaatgggtctttaagggcgatctattgatgagaaggtcttctgggtgggatgatcaggttttgctgaaatccacactaaacacttttctggttttaacatttgatcccaaattatggataagttgccaaagagaacattcaaaatagtttccttcatgtgcttgttaaggcgtagactgtctctgaaggtcctcagattggcattggaagacttaacttctttcccttaaggactggaagaaaatggagatgaaataagaatttaccatctgatgaaaggactgctttataacttgatgcataatcttggtatcatctcttaatggccggctcacagtatatgttcgattgttaaagcaaagggggagtccatctccggttgactatggacctactgatccccgacttggttactggcacccttccccccagctgtaaacttagcgattggcctcaaattgtctattgtacatctcatacaatcaaatcagcagtccttctcaagtcctagaacttgtgtccacatgtctttctacctagagcctttttcctgatcaactgcaactgccccatagctagtcactgtacttggactgctttctaccctacatagcagctagtggattgggttttttaatgacccaatacctgcccttggcaatcagaatgtagtgcaagccccttaccctggcctacgaggcgctaggtcaagcttgtccaacccgcggctcaggatggctttgtggcccaacacgaatttgtaaactttcttaaaacatatgaagtgtctttttgtttgtttttgctcataagctrtcagtgtattttatgtgtggcccacgacaattcttcagtgtgggccagggcagccaaaaggttggacacccctgccctatgtgaactggtcttggttgactcatctccaggtttatagattttgaccccactaggcttttttccatcacaccaagctggttgttgccttggggcttgtaataagttctggaatgtttttcactactaaccaagtattctgtcaaatgtcatctcacagctgtcttgcatagtacacataacctattggcctgcatgtttttatggcatttgtttctttattgaaaatatttgtcttcttgcattagaacacaagcattgtggatggcagagacttgactgttcacatctgtatctgctggaatacttattaaatggatgagtaactccttaggccagtgtcagcattgctgtcatcccaggacctacctttggtcmcatacaagtagaagaagtcacagtagaagatggtttgtactactccagacacgactgcaatttggtcatagaaattctcagtctggtaccgcctgatccagttagccaggtagagtgcccggtacagacccagaaagaacaggtagtgagtagttatggtctcagcctctccagtcttgctgatcatgaagagctggggcaggatagccactgattccagatagatagagaaagtccagaggatctgagccaaagagaaagcaaccagagactgagcaagaccaagaagaggcccatcttaaaagaacataattactaaaacaatagcttgctggagaaggtacagtaaggaggaaaaaagttctcaataaaaattataatattttaatcagtttaacctaccatctctaggtaaatataagggtttttttttctaatttttgaaagattatacagtacactgcttttttcacagtgtagcgtgagcatttatatagaaaactacttttaatttttttttttttaagatagggtcttgctgttgtcacccaggctggagtgcagtggcatgatcatagcttgctgcagtctcaaactcctgggctcaagtgatctttccatctcaccttccttagtagctgggactacatacaggcatgtgccactacacccagccaaaaataacttttttatttatttttttgagatggagtctcgctctgtctcccaggctggagtgcagtggtgcgatctcggctcactgcaagctccacctcctgggttcactccattctcctgtctcagcctcccgagtagctgagactacaggcgcctgccaccacgctcggctaatttttttttttctatttttcagtagagacagggtttcactgtgttagccaggatggtctcgatctcctgacctcatgagccaccgtgcccggccaaaaataacttaaatgatagtttcatagtataaaatcataattgaagccacagtttcttaaaatctagtcatgttgccaggctcacacctataatccgagaactttgggaggccgaggtgggtggatcacttgaggtcaggagttggagaccagcctggccaacatggtgaaaccccgtctcaactaaaaatacaaaaattagctgagtgtggtggctcgtgcctataatcccagttacttgggaagctgagacaggagaatcacctgaacccaggaggcagaggttgcagtgagctgagatcctgccactgcactccagcctgggcaacagagtgagactccatctcaaaaaaataataaaaaattagtcatgtccataaacaccagcatcagaatctcccatgatgcttgttgcctgcagattcatgggccacagtccaaacttactgagttgaaatttctgggcctggactgtgctacagggatacagggatctgctaatcggttgaacagaacgtctcaacagccagaagtagggctgtgatgcctgcttggtttatgggcatcatgactattgagatgtgctcatttccaactaaagcattgtaaatagcttgtcaatttcttctcaacttataactgaaagatacatgagtaatggtcacagttgtaagcagaaggcaagcccagggtctggagggaaggatgcagggagcatatttccctttgagaactggtactcagtccattcccttacctccagcagagtgaaactgtagttttcaaggaaggaaaggccaatgactgggaccagaagaaactccaggcggaatgtgtcattctcactgtcaaaagttttacggaatttcccatatatcatgtacactgtaacataggcacagaggagaaaaaccacctaaaaggggagagagacatgggaatcgaatctatgaagtcatttcccagcctatttactacgctcctagcctaccaaacctaagggtcagtgttctgccataatgtaacatgaagaggttaaatgtgtttgcaatttatcttgggtccagttgcctagaatttgaaatcagtgaccctttcattaaataactccatgcttctatactgggactgacagtgctgccatgaacaaaggtgcccttgtcgtccccttcatttgtggagcattaggtgaaacaggattggtctatttcaggggatttaccagaggcattccagggctcttgaaacaattttaaaacaatttcctggatatgcatcagtgacttctgagcattcttccacaaggactagcctttttttttttaaatgttgcccagtctggcctcaaaccctggggtcgagtgatcctcctgctccagcctccctagaagctgggactacttatggcctgctaacatcccttgaactaactgaccattgctccttcagaaaagctctcctaatcacagtagctgtcctctggcatataatgatttcattttgatatggcctccaaccttccaggccagcacttctcaaatgagtgtgcatcaaaacacagatgctgcctgggtgtggaggctcacacctgtaatcccagcaccttgggaggccaaggtgggcagatcacctgaggtcaagagtttgagaccagcctggccaacatggtgaaaccctgtttctactaaaaataaaaaaactagccaggcatgcatgcgggcgcctgtaatcccagctacctgggaggctgaggcaggagaatcgcttgaacccgggaggcagaggttgcagtgagccgagatcatgccattgtactccagcctgggggataagagtgagactctgtctcaaaaaaaaaaaaaaaaaaaaaaaaaaaaaatcacagatgctgtctcttcccttgccccaagagcttttgatttcataggtctggatgggcctgaaagtttgttcttccttttttttttttttttttgagatggagtctcgctctgtcgcccaggctggagtgcagtggtgcagtcttgtctcactgcaacctccgcctcctggattcaagtgattctcctgcctcagcctcctgagtagctgggattacaggcgtgcaccaccatgcccggctaatttttatatttttagtttcaccatgttggtcaggcttgtctcgaactcctcacctcaggtgatccgcccgcctcggcctcccaaagtgctgggattataggcatgagccaccgagcccagccttaaaagtttgtatttctaacaagtttcccaagtgacgctgatactgccggagcaggaccacactggcctagagcactcctatttgtactcctatttggagttatttcctcgaagcagtctttttttcactacaatgaggcacacattctgtcgccatagctccatgtgaacatactcattttagcccgtgatcacatgctctgtaaatgtctaggtacaagtccatctcccctctaagagaggactccgtggcaaggtccacctcctaatccccagctcctaactcagtccctggcacaaaacaaatgctggaatgagtgaatgaggtggtcactttttcatttcataaatgtagaaactagcctctttgagcttcctagacctcattcagctatggcaagggctgagtctgctgtctctgccaggaatgcccaaggctgacttgggctgagaaatgaactagcaggtgatgtttgatacatgtgtgaacttaagtagacggtgatttccagtcctcagattcacattcactaaatctgaatgagttcaacacctcacaagtaacagcaacc

SEQ ID NO: 96101 - DNA, 24030 bp, Homo sapiens
atcccttgaacccgaggggtggaggttgcagtgagctgagattgcaaactccagcctgggggacagagcgagatgccgtctttaaaaaaaaaaaaaaaaaagtagcagaaaaactgggaggttgagggtgttccattggtagccccagagctggggttccagctaggagaggtcaccccggccctgctgcccctgccagcgtcccctcctctttctctctccccgtcttcctgcctgggaaagcagcagacattctcagggctgtggagggatgggggaggcccagagcccagggacgtccaggcagctgtgttcagtgggcatcagccctgaggactccggtgcgggggtctctgcattggggtttctctcttgtgccttcagaaacccgatgaaggcaatgtatccaggcacattctacttccaatttaaaaacctatgggaagccaacgatcggaacgaaacttggctgtgcttcaccgtggaaggtataaagcgccgctcagttgtctcctggaagacgggcgtcttccgaaaccaggtagcaccaaagtcctagttacaccctaaataggagctaagcagctgggaatgcagaaaacgcaacaataagtgatgtgcccggcgtgggctctcctgtgtgcactttcctgccacatttctatttttttttttttttttttgagatggagtctcgctctgtcacccaggctggaatgcagtggtctgatttcagctcacggcaacctctgctttccaggttcaygcgattctcctgcctcagtctcccgagtagctgggattacaggcacctgccaccatgcccagccaattcttttgtatttttagtagaaacaggattttgccatgttggccaggctggtttcgaactcctgacctcaagtgatccaccagccttggcctcccaaagtgctaggattacatgcgtgagacaccatgcccctggcctcctccccacattatttatttatttatttatttattttgagacggagtcttgctctatcgcccaggctggagtgcagtggcacaatctcagctcactgcaagctccgcctcccgggttcacgccattctcctgcctcagcctcccaagtagctgggactacaggcgcccaccaccatgcccagctaattttttctttttttctttttttttttttttttagtagagacggggtttcatggtgttagccaagatggtctcgatctcctgacctcatgatccgcccgccttggcctcccaaagtgctgggattacaggcatgagccactgtgcccggcctccccacattttttaagtccatggcccagatcttcctccctgactctcctgtgatcagatcgtggagggggtttgcttcctcccaaaaggccttgtttagcgcccagcaccctcactcttgactttgtttcccaaaatcttgttatggagctgtgcgtccggcagtcctcgggaatcagcagctgtgggaagcggggggtgttgtgtccagcgctgtgtctgggccagtgactgcgggctggtggggccgcccccgccactgccctgattcctcagcagaaggcaggcagggaacaaagctgaccccagagagccaggccatagcaggggctgaggatgcctggtgaatggatgcctgggagaaaagatggcagaattcacacatgagtctatgagacagggaaagaatcaataaaataaagaaggaaggggccgggcacggcgcggtggctcatgcctgtaatcccagcactttgggaggctgaggcaggcggatcatgaggttgggagttcgagaccagcctggctaacatgatgaaacccagtctctactaaaaatacaaagattagccaggtgtgggggtgcatgcctgtagtcccagctactcaggaggctgaggcaggagaattgcttgaacctgggaggcagaggttgcagtgagccgagattgtgccactgcactccagctttggcgacagagcaagactccatctttgaaaaaaataaaaataaaagaataaagagagaaggagaaggatagaagaagggaaactcaatgaataaaacaccctggggcctactatgtagccagaaaaatgaaaagtaaagaaataaaataaggccgtgcatgtggtttatgctcatagtcccagagctttgggagggtgaggcaggaggatcgcttgagcccaagagttcaagatcagcctgggcaacatggtgaaaccccgtctctaaaaaaattatttaaaaaattaggcaggtgtggcggcatgcacctgcatcccagcttatcaggaggctgaggtgggaagattccttgaacctgggaggtcaaggctgcagtcagcccagatcccaccactgcaccccctaacctgtgcaccagagagagaccctgtctcaaaaatgagtaaataaggaaatggcccggggctccaggcccgccctctgctcccatcgccccacccctgcactcctcctgctcctggtctgagctcccctgtcctcctcctcctccttcgccaggtggattctgagacccattgtcatgcagaaaggtgcttcctctcttggttctgcgacgacatactgtctcctaacacaaagtaccaggtcacctggtacacatcttggagcccttgcccagactgtgcaggggaggtggccgagttcctggccaggcacagcaacgtgaatctcaccatcttcaccgcccgcctctactacttccagtatccatgttaccaggaggggctccgcagcctgagtcaggaaggggtcgctgtggagatcatggactatgaaggtgagacgtggggggctgaggagagtgggtgcaggagggacagcatgaggggcagatggttctccaatgctgtggggcgggtcagtgtcccctgggtgtctgtggggaccgggccrgcgcccactgcaactggcagcctggatacctgggctgggaggggagggcccagggccaggagagaggcctgctgggccctcactgttttctccttgttttttctcagattttaaatattgttgggaaaactttgtgtacaatgataatgagccattcaagccttggaagggattaaaaaccaactttcgacttctgaaaagaaggctacgggagagtctccagtgaggggtctccctgggcctcatggtctgtctcctctagcctcctgctcrtgctgcacgggcctcccctccaccctggacccgctctgtttctgcctggtcatcctgagcccctcctggcctcagggccattccacagtgctcccctgcctcaccgcttcctcctcgctcttccagactcttcctgcagaggctcctttctgcctccatggctatccatccacccccacagaccccgttcctccagcctgcgtgcccctaacctggcttttcccatctccccagcataaccaaatcttactaaactcatcctaggctgggcatggtgactcacgcctgtaatcccccagcaatttgggaggcaaaggtgggagaatygcgtgagcccaggagttccagaccaggctgggtcacatgacaaagccccatctctacaaaaaaaaaaaaaaaaaaaaaaaaaagccagatgtggtggcatgcatctgtagtccaagctacttgggaggctgaagtgggaggattacttgagcccgagaggtggaggctggagtgaacagagatcgcgccactgaactcgggtctgggcaacagatagagaccctgcctgaaaataaatcgataaataaactcaacctaaacaggtgtgaatatatgtaagttgaaaacccgaagttttgagaaacatcctttgtaaatttcatcctatgaattgggtcattcatgtcctacccagctaaaacagaggccaggagccagggaggaaaagcagtcaggccacacaacattgtttccgaaatggacttctctgcaagcctgactcctgagactgtgcattgtaccctgaaaccagctttatccatagcttctgcgataaatggctgtaagtcttggactccttgctccaaacgcagcgactcagcaatagaacctcccagctcccagcccttcctagtgcccatgggctttacatagggcaagagaacatttctccttctataattgccatctctttgctctctcaacatggtgaacaccatccggactccgtgtatgtctcaaattacaattctttctttgcaaatgaaatatgaaatttagaggctcttctaaacactttaaatttgatttgacattttcaaagcagatgtaagttttagagaatgagattctccataaaaatgaccctttcatgctgtggcctccatagaagatgtcccaggccaggtgcccacatggcaggcatttattttctcacagatctggaagctgcaggtccaacttcgaggggtgggtggggttgtttcctctgaggccgctccttctggctggcagggagtctcttccagccgtgtcctctgtggcctttcctctatgcacacgcacctctgggatctctctgcctccaaatatcatcttttttttttttttttttttttttgagacagagtgttgctcctcttgtccaggctggaatgcaatggcacaatctggactcactgcaacctccgcctcccgagtttaagcgattcttctgcttcagcctcccgagtaaaaggcatgcatcaccacacctggttaattttgtagttttagtagagatggggtctcaccatgttggccagactggtctcgaactcctgacctcaggtgatccgcctgtctcagcctctccaagtgctgggattacaggcatcagccactatgcccggctgggatcatatgttccacacatgtttgttcaataagcatggactgcaaccacctacatgaatattcatagctcctcctgtagcctgttgaatatgtatgtttagccaacctcttcagcataaagctcctgcccaaacccctcctgctcctaaatgtctgtctctggtgttaaccagaggctgctcttcccaggctgctggatggctaccttgcaggctgtcacccttaacaagaaataaagtgtcctttgcaaatgcatcccttgtgtaatttgtaggtcaccgcgccatgggaacacgctaccatgggaagggagctgtgagacgcgcagggaggctccagacaggctggcctgggacaccagccgctgcccttccataacatggggacaagagagggcaaaagttcagcccaacacggaggatcttcgggcaggagatggggaagaaggagaagcaggaaggaaagagctcagtgtgggggcgcgcatggcatcccggtgggacatctgaggcccacacccacctgctgtccctccctcccacggtggccaccgagggtgaaggcctggggggaggcagacgcctggccctttactctccctccctgtccccatggccgctgggtgggggccgtctctgggatgatccccgagggcaggatccgggagtccctgcagaggcatcagcctgtctgtcttgatggtggagtggcggctccagctgggcgggaccaccaggggaggggcttgtgctctgctggctcagcctggtgtggacccacctcccgggcgctggctgcaatgactttctctttccctttgcaattgccttgggtcctgccgcacagagcggcctgtctttatcagaggtccctctgccagggggagggccccagagaaaaccagaaagagggtgagagactgaggaagataaagcgtcccagggcctcctacaccagcgcctgagcaggaagggggaggggccatgactacgaggccctgggaggtcacttttttttttttttttttttgagaggaagcctcgctctctcacccaggctggagtgcagtggcaggaacttggctcactgcaacctccgcttcccaggttcaagtgattctcctgcctcagcctccagagtagctgggattacaggcgcacgtcaccacacctggctaatttttgtatttttagtagagacggggtttctccatgttggtcaggctggtctcgaactcctgacctcgtgatccgcccgcctcggcctcccaaagtgctgggattacaggcgtgagccaccgtgcccggccgggaggtcactttaaggagggctgtccaactgcaaggagccgcaagcaggaagtgaaaccacagcacttcaaaaaaagagggagactgggacaagcgtatctaagaggctgaacatgaatccacagatcaggtaccgctgcccactatgtccgcagggcccctccggccccttccttctggtggtcctgctgggcctcagccctggcctccccctgccccagccccagccctggacttccttccctctggcttccctgccgcccccactcccagccagactccttgccctgctgtgtggtcgccccactgctgcttctgaatgggccaccttccccacctgccacagtccaggccccctcctgagactcttccctgaaagtcatggccaggccggtgctccctgccctgagagggtgctccctctgtgtgcttcccaccattcctgagctcaggaactgggagaattgaaccaaaggatgactggggcaatcaggcattttgttctcagtgctttgatgaactttctgtaagatttactttgtttaaatacaaagtcttaggagagggtgtggggagggaatggtctctgaagcacaagataaatcacatcgtccaaggatgactccacagtcagcagatgtccccagacaggttccactccaaggtcactcttcatcttttagaacatgaccagtaacatggaatgtgagaaagaacgcgatgatcaggagaaatgctcttattttaaatttagtgaaaagagagcccagtccccaacagctttctcctgcagggcccgtgatgcagaggctgcacagggctggcctggaaaggggcccctgctccaactgtccccagctctgtggcctgggcaggttaccccacctctctgtgcctctgacccctcctctgtaagatgggaatggtccctgcaggcctagggcagcctcacatgagcccacccccacgcagcacttagaagagaggcctgggcctcagaattcggttctaccatgattttaaaataatgttaacacgcagagtgaaacatcaggaaggaattgagctgaaaggttaaaagctatcttttaagggtgaagagttttattctcttttgcattttcctaatgggttggggagtgggtgggcagaaatactgagagggtggggaatatacccctggaaaggccagagttgggccygagctgggagagatcaccccagcccccctgccagcatcccctcctcttcctctcccctcagtcttcctgcctgggaaggcagcagaaattctcagggctgtggaggggtgggggaggcccagrgccgtcccgggagctgtgttcagtggacatgagscccgaggactccaggagggctccctgcatgggccggtttctctcttgtgccttcagaaatccgatggagcggatgtatcgagacacattctacgacaactttgaaaacgaacccatcctctatggtcggagctacacttggctgtgctatgaagtgaaaataaagaggggccgctcaaatctcctttgggacacaggggtctttcgaggcccggtactacccaaacgtcagtcgaatcacaggcaggaggtaagcagctgggaatgcagaaaacacataagtaaaatgtctggcggcgggctctcaactgtgtattttttccccacatttatttattttttctatttatttatttatttatttattttgagacagagtctccatctgtcgcccaggctggagtgcagtggtgcgatctcagatcactgcaacctccacctcttgggttcaagcgattctcctgcctcagcatcctgagtagctgggactacaggtgcgtgctaccacgcccggctaatttttgtattttcagtagagatggggtttcactgtgttgagcaggctggtctggaactcctgatctcaggtgattcacctgccttggcctctgaaagttctgggattacaggcataagccaccgtgcctggccacttcctatatttcttttttcttttctttctttctttttttttttttttgagacagagttttrctcttgttgcccaggctagagtgcaatggctcaatcttggctcattcaacttccgcctccygggttcaagcgattatcctgcctcagccacctgaatagcagggattacaggtgcacgccaccgygcccagctaatttttttgtatttttaatagagaagggatttcaccatgttgtccaggctggtcttgacctcctgacctcaggtgatccacccaactcggcctctgaaagtgctgggaatacaggtgtgagccactgcgcctggcctccacttcccacatttcttaagtccgtggcccagaccttcctgcttgaccgccccggccaccgcccggattcctccttggcaaagatgcctcatcacagtttggtgaaccctcactcctcaccctgccacccccactggggacactaagttccccgccttgtcccacccatccctacggccccctccacccagggaggagacttttcagagtgtgtttggggagggagtcgtctgtatgctgggcagtcctggcctacagcggtgctggccacggaaacacccaggactcaggaatgaagcacaagtgtttccagtccccacacgctaaaaaggcgacargaaccggtgaaagtaattttaatattctatttaatccagtgtagctaacatattacttcaacgctgattaacataaaattcttcgcgagatagtgaagtttctttttcttctcacactgaaatgagtggtgtatttttgatgtgccgaggtctctcatcagagccctgtttcagatgctcagtagcgcccttggccagtgccccccaatatgggacagcgcaggtccagtggcctccccagtggggaacaaggcggaccccagagggccaggacacagtaggggctgaggatgcctggtgaatggatgcctgggagaatggatgccagaattcacacacgaggccatgaacagggctgggaaaacttccaaacacagggaagcacgtgtcttggtgcaccttgtgatgcttcaacagcaggactgagacggggacatttacagtgaacagaaatgtgttggctcgagttctggactccaggaagtccaacgtcaaggcaccagcaacyttccagggccygcgagctgcacagtcacatgggggtgaaggttgttgccagaagctcaggggatgctccagacagagtggcctgggatgtcgagtcactggtgctccgtgacatggggacaagaggaagcagtttagtctgacatactgcccccccagctagagggcaagagacagaaagaggggctgaggtcacctttgaataaccacagcagtggcacccacaaaggtgcagtccccacagcctcatagcctcttctaggtgccacctcttaaggccagtaccatagcaattaacactgaaggtcagcttggagcagacaatcactcaaaccaaacaggggggatggaggaaaggagcttcaatggcaagatcccctgggctcctgtcctggcccctcctccccctgccccaccccgcacccctcctgttcccccgtcccagagcttcccctgcccctgctcctctcccaggtgtatttccggtttgagaaccacgcagaaatgtgcttcttatcttggttctgtggcaaccgactgcctgctaacaggcgcttccagatcacctggtttgtatcatggaacccctgcctgccctgtgtggtgaaggtgaccaaattcttggctgagcaccccaatgtcaccctgaccatctctgccgcccgcctctactactaccgggatagagattggcggtgggtgctcctcaggctgcataaggcaggggcccgtgtgaagatcatggactatgaaggtgagaggtgcaggggtcaggggagcatgacggggaggaacagcctcagagatggatggatctgcaatgccatggctgggggtgttccagggcagcctgcaggggtggggctggcactgattgcaactgacagccaggagaccaggcctgggagggcaggcccagggtcaggggagagcctgagtgcttcccacctcttcatctcagactttgcatactgctgggaaaactttgtgtgcaatgaaggtcagccattcatgccttggtacaaattcgatgacaattatgcatccctgcaccgcacgctaaaggagattctcaggtgagggtctccctctggcctcatcgtctctctcctctcgcctcctgctcatcctcctgaggmctcccctggctgggccctcctgccctccgtcctgcccccctgcctgccctcatggttacaccccctcacccacactcctcatgctccctccaccttggtgcctcccccctgctttcctgggctcttcctgtgagtgagaggccccttctgcctccagagcgacctccatccacccccgaggctgccctccccacagcctgggagccccaacctggctccttcyatctccctggcataaccgaatttgtcataaaactggacgtagtaagtgggcatgaatagtcacaagcccgacagtcggaagctttgagcaacatccttcaaggccgacctgagcccctgagaaggagccgccaccatggaaacagagcttcaggcttccgcggccatagaagatgcccccgggccgggtgcccacagggcaggcatttattttctcacagatctggaggctgcaagtccaaggtggaggggtgggtgrggttgtgtcctctgtggccgctcctcctggctggcagggggtcccttccagmcctgtcctctctggcctttcctctgtgcacctgcactcctggggtctctctgcctctaaatgtcctccttgtttatggaccccagtcagacaggattagggcccaccctaagggccatgagttaatttaatcaccactttagtgtacttgtctccaaatacagttatcctgtgaggaggtggggttgagggcttcgacatgtcaatgtagggaagatacaatttagcccatgacaatgacccagggggcttgggtcaagcttgggtggggtgtgcaggggtccccgttctgtgtgtctgtctcccaggcgagtcctgccctgactcccacagcccctccctccagaccatggcttccccacctaacagcacctagctgggcctccggctcacgcctgtcccttctcaaatccctcccacagggatggagatgcagaaagagtcaagcaaacactcagtgatcaaggtcccatttgagtaaggtttttttktttktttktttttgagacagcgtctccctctgttgcccaggctggagtgctgtggtgcgatctcggctcactgcaacctctgcctcccggttctagcaattcccttgtctcagcctcccaagtacctgggattacaggctcatgccaccatgccggctaatttttgtatttttagtagagacggggttttgcaatgttggccaggtgttgagtaagattttacaaaagagtaggcttggatcatgggaggcttgagatgctaggagctctccaggaagcacaacagaaaagggcaaccagggaccagagaggccctagaaagagatctaaggccctcgggagagatgggaactgagcacctgggtcttagaccggaggagcaaactgcaagacagggtggccggggacaccagcctccgcccttctgtgacatagggacaagagctcagcctgccagggaacaactctgggcaggagatgtggaaggaaggagctcagtgtgggggcacgcatggcatcctggggggacatctgagggcmcccccacccactattcctccctccaatggtggcctctgagtgtgaaggcaagggggaagcagacacctgcccctcactctccctccctaccacatagctaccgggtggggggcgtccctgggatgattcctgagggcaggatccaggggtccctccggaggtcctcccatccaggtgagaaagcagcataaagtgaggcctgcactcagatgggcctgggaggtcactcacagcgcaggtgtctcctggaacaagggccctggacgatagaaatagaacccaagcccaggactaaaatcagggccaggacaagcctgccagggaggctacacatgaagcctcagatcagggaccactgcccgttctgcccatggggcctctgctgccccttcctgcctggtggccctgctgggcctcagccctggcctccccctgccccagccctgggctccctcccctctggttcctctgctgctcccactaccagccaggctctttgccctgctatgtggtcgccccactgctgcttctgaatgggccatctcccccacctgccccagcccatgccccctgctgagattctcccctgagagtcatgcccgggctggtgctccccgccttgggagggtgctccctctgtgtgcttcccgccattcctgagctcaggaactgggagaattgaaccaaaggatgattggagcaatcaggcattttattctcagcactttggtggaatttctgtaagatttactttgtttcaatacaaagtcttaagagagggtgtgggggaggaaatggtctctgtaccagaaaataagtcatttcttccaaagacgcctccgctgtgagcagaggaggatgcacacgaccccagacacaggctcctcctccgtgagcaccattcaccttttagaatgacacctgcaacatggagtgtaggaaaaaatatgatcaggagaaatgctcttattttaaagtttagtaagaagacagcgtggttgcctacagctccccaccgcagggcctgcgatgcagaggctggacagggctggcctcgaaaggggccccagctccatccaccgccccagctctgtggtgtgggcagattatctggcctccctatgcctctggcacctcctctgtaaaatagggatggcccctgcaggcctcaggcacatgccatgagctcagacatatgcagcacttaggagagtagcctggaccggccgggctcagtggctcatgcctgtcattccagcactttgggtggttgaagcaggcagatcacgaagtcagttcaaaagcagcctggccaacatggtgaaacatgatctctactaaaaatacaaaaattagggccaggcgcggtggctcacaccggtaatcccagcactttggtaggccgaggtgggtggatcacaaggtcaggagttcaagaccaccctggctaacgtggtgaaaccccgtctctactaaaaatacaaaaaattagacgggcgtggtggcatgcacctgtagtcccagctacttgggaggctgaggcaggagatttgcttgaaaccaggaggcggaagttatagtgagccgagattgcaccactgcactccagcctggtgacagagtgagaccgtgtgcaaaaataaataaattcgctgtgatcccgatataaaaataatcatcatcatcatcggacaggtgaaatgtgaggaaggaattgagctgaaatgttcaagcaattatttcagggtgaagagttttattctctgttgcattttcctaatgggttgggagatgtgtggcagaaaaactgggaggttgagggtgtcccattggtaggcccagagctggggttccagctaggagaggtcaccctgtccctgctgcccctgccagtaccccctcctctttctctctcccagtcttcctgcctgggaaagcagcagacattcccagggctgtggagggatgggagaggcccagactccagggacgtccagggagttgtgttcagtgggcatcagctccgaggaatctctgcactggggtttctctcttgtgccctcagaaacccgatggaggcaatgtacccacacatattctacttccactttaaaaacctactgaaagcctgtggtcggaacgaaagctggctgtgcttcaccatggaagttacaaagcaccactcagctgtcttccggaagargggcgtcttccgaaaccaggtagcaccaaagtcctatttacaccctaaataggagctaagcagctgggaacgcagaaaacacaatacgtgacgtgccccgcgtgggctctgctatgtgtactttcctcttacatttctttcttttttttttttttaagacagagtctccctcatgcaacctctgcctcccgggttcaagcgattctcctgcctcagcctcatgggtagctgggattacaggtgcccgccaccacactcagctaatttttattttatttatttatttttttagtagagacggggtttcaccgtggtggccaggctggtttcaaactcctgacctcaagcgatccgccccgcttggcctcccaacgttctaggattacaggcatgagccaccacgcccaacttcctcccacattttttaagtcsgtggcccagatcttcctccctaactttcctgggatcagattgtcgaggggttttgcctcttaccaaaaggccttgtttagcgcccagcgccctcactcttgactttgtttcccaaaatcttgtcatggagctgtgcgtccggcagtcctcgggaaacagcagctgtgggaagcggtgggtctggtgtccagcactgtgcctgggccagtcactgtgggctggtggggccgcccccgccactgccctgattcctcgatgtcaaggacacatcctcacagggtggtgaaccctcgctcctcaccctgccgcccccacagcagccactgacctcccacccaccctgycgtgtcccacccaaccctgcggccccctcctcccaggcaggagatttttttcagagtgtgtttggggagggagccgtctgtgtgctgggcaggcctggcctacagcagtgctggcctcggaaacacccaggactcaggatggaagcgcaagtgtttccagtccccacacgctaaaaaggcgataagaactcgtggaagaaattttagtgtctgcattagctcaattatctcacataggatttcaacatatacttaatataaaatgcctcatgagagagttaaagtttgtctattctcacaatgagattttgaaatgcgctgtgtattttacacgtgccaacgtttctaatcagagccccatttcaagtgctcagtagcccctttggccarccttcaactccatgggacaatgtgggtccaatgaccttcccagcagaaggcagacrggggacaaggcagaccccatrggaccaggccacagcaggggctgaggatgcctggttaatggatgcctgggggaaaggatgccagaattcgcacttgagggcatgatgagacaggaaaagactcaataaaataaagaaggaaggggccaagcgcggtggctcacgcctgtacgcagtagctcacgcctgcaatcccaacacatcgtgaggcctaggcgggcggatcataaggtcaggagttcaagaacagcctagctaacatggtgaaaccctgtctctactaaaactacaaaaattagccaggcgtaggagtgcgcgactgtaatcctagctactccggaggctgaggcaagagaatcgcttgaacccaaggggcagaagttgtggtgagctgagatcgtgccgttgcactcccgcctgtgcwacagagcaagactccatctcagaaaaaaataataaaaaaataaagaggaaggagaaggatggaataagggaaactcaatgaataaaacgccctggggcctactatgcacccagaaaaatgaaaagtaaagaaataaaataaggtcgtgcatgtggtttatgctcatagtcctagaaatttggtaggctgaggcaggaggatggcttgagcccaagatttcgagatcagcctgggcaatgtggcacgactccgtctccacaaaaattacaaaaaaattagccgggcgtggcagcacacacctgcagtcccagctaatcaggaggctgaggtgggaagattccttgagcctgggaggtcaaggctgcagtcagcccagatcgcaccactgcaccccagcttgggcaacaggagagaccctgtctcaaaaataaataaataagaaaatgccctggggcttcaggcctgccctcttctcccatcgccccacccmtacactcctcctgctcctggtctgagctccccctgccctcctcctcctccttccccaggtggatcctgagacccattgtcatgcagaaaggtgcttcctctcttggttctgtgacgacatactgtctcctaacacaaactacgaggtcacctggtacacatcttggagcccttgcccagagtgtgcaggggaggtggccgagttcctggccaggcacagcaacgtgaatctcaccatcttcaccgcccgcctctrctacttctgggatacagattaccaggaggggctctgcagcctgagtcaggaaggggcctccgtgaagatcatgggctacaaaggtgagacgtggggggctgaggagagtgggtgcgggagggacagcatgaggggcaggtgggtctgcaatgccgtggggcggggcagtgtccccgggaagcctgcagggatggggccggcgccagctgcaactggcagccaggagacctggcttgggaggggagggcccagggccgggagagaggcttgctgggccctcactgctttctccttgtttttttctcagattttgtatcttgttggaaaaactttgtgtacagtgatgatgagccattcaagccttggaagggactacaaaccaactttcgacttctgaaaagaaggctacgggagattctccagtgaggggtctccctgggcctcatggtctgtctcttctagcctcctgctcatgctgcacgggcctcccctccatcctgsaccagctgtgcttttgcctggtcatcctgagcccctcctggcctcagggccattccatagtgcccccctgcctcaccacctcctccccgctctcccaggctcttcttgtagaggctctccatccacctccccagtcctgttcccccagcctgggtgcccctaacttgactcttcccatctccccagcataaccaaatcttttttttttttttttttttttgagacggagtttcactctgtcgcccagactagagtgcaatggctggatctcagctcactgcaaactctgcttactgggttcaagtgattctcctgtctcagcttctgagtagctgggattacagatgcctgccaccacgcccagctaattttttttttttttttttttttttttgtatttttagtagtgactgggtttcaccatgttggccaggctggtcttgaactcctgacctcaggtgatctgcccatctctgtctcccaaagtgctgggattacgggcgtgagccacccggctcggcygcacaaccaaatcttattaaactcaatctagtctggccctggtgactcacgcctttcggaggcagaggtgggagaatcgcttgagcccagaagtttgagaccagcctgggccacacgacaaagccccatttctacaaaaaaaaatacaaaaaaaaagccagatgtggtggcatgcacctgtagtttaagctacttgggaggatgaagtgggaggactgcttgagccggggaggtggaggctggagtaaactgagatcgcgccacagaactccagtttgagcaacagatcragaccctgcctgaaaataaatcaataaatacactcaacctaaatggatatgaatatatgtaagttgaaaaccagttttgagaaacatcctttgtaagtttcatcctacgaattgggtcattcatgtcctacgcagctaaaacagaggccagcagccagggaggaaaagcagtcaggccacacaccattgctcccaaaatggacttatctgcaagcctgactcctgaaactgtgcattgtaccctgaaaccagctttatccatagcttctgccataaatggctgtaagtcttggactccttgctccaaacgcagtgactcagcaatggaacctcccagctcccaacacttcctagtgcccatggtgggctttcccacagggcaagagaacatttctcctttttttttttgaagtggagtctcgccctgtcacccaggctggagtgcaatggcgcggtctccgctcactgcaacctccacctctgttgttcaagtgattctcctgtctcagcctcccgagtagctgggattacaggcgtgcaccaccacaccgggctaatttttgtattttcagtaaaaacgggtttcatcatgttgcccatgccaggcttatttttatttttttcagatgaagtcttgctctgtcacccaggctggagtgcagtggtgcaacctgggctcactgcaacctctgccacccgggttcaaactattctcctgcctcagcctcccgagtagctgggattacatgggtgtgccaccacgcctggctaatttttgtatttttagtagagatggggtttcagcatcttggctaggctggtcttgaactcctgacctggtgatccacccgtctcgggcacccaaagtgctgggattacaggtgcgagccacctggccaggcttaggctggtcttaaactcctgacctcaagtgatccgacctccttggcctcccaaattgctgggattgctggtgtgagccacagcgcctagcccatttctcctttttataaaacctgttgctgtctctgttctcccaacatggtgaacaccacccggactgcgtgtatgtcccaaattctttctttgcaaatgaaatgtgaaattagaggctcttctccacactttaaatttgacttgtcattttctaggcagatgtaagttattagagaatgagattctctataaaaatgaccccttcatgctgtggcctccacagaacatgccccaggccaggtgcccacacagcaggcatttatttcctcacacatctggaggctccaagtccaagttcgaggggtgggttgggttgtttgctctgaggctgctcctcctggctggcagggaatcccttctggctgtgtcctctgtggcctttcctctgtgcacctacctgcacctctggggtatctctgcctccaaatatcatcttttttttttttttttttttttgagacagagttttactctcgttgcccaggctggagtgcaatggcataatcttggctcactgcaacctccaccttcagggttcaagcgattctcctgtctcagcctcctgagtagctgggactacaggcatgcgccaccacgcccggctaattttgtagttttagtagaggcgaggtttctccatgttgctcaggctggtcttgaactcgtgagctcaggtgatccaccctcctccacctcccaaagtgctgggattacaggtatgagccaccgtacccggcctttttgttttgttttgtttttgtttttgtttttgtcttgagacggtgttttactctgttgcccaggctggagtgcaatggcatgatcactgctcactgcaacctccgcctcccaggttcaagcaattctctggcctcatccttctgagtagcggcgattacaggcgcccagaaccactctctgctaatttctgtattttttagtagagatggggtttcaccatgttggccaggctggtctcgaactcctgactgcccacctcggcctcccaaagtgctgggattaaaggcatgagccagggcacttggccacccttctccttgatggacccccgccaagtgaatttgtgcccacactagaggtctcgtttaaattaatcatcttggccgggcgtggtggctcacgcctgtaatcctcccactttgggaggctgaggctggcagatcacttgaggtcaggagttggaaatatgcctggtcaacatggtgaaaccccgtctctactaaaaatacaaaaaaattagcagggcgtggtagtggatgccagtaataccagctactcgggaggctgaggcaggagaatcgctggaacccgggaggcagaggttgcagtgagctgagatcgtgccattgcactccagcctggaagacacagtgacgctgcatctcaaaaaaaaaaaaaattaattaattagttaatcatctgttggctgggtgcggtggctcacgcctgtaatcccagcactttgggaggctgaggtggcggagttggaggtcagcctggccaacatggtgaaaacccacctctactgaaagtgcaaaaagtagctgggcatggtagtgggcacctgtaatcccagctactcgggaggctgaggcttgaatcacttgaaccagggaggcagagtttgcagtgagccgacacggtgccactgcactgcagcttgggcgacagagtgagactccatctccaaaaaaattaattaattaattaactaatcatctgttgaaaaggacctgtctccaaatacaaccacacattgaggtagaggggttagggcttcagtatattgatttttgggagaaacagggcaacatggcaacaagccacagtcactgtgggcgggcctgagtggggagtgcaggggttcctgtcctgtgtgtctgtctcacaggggagtcctgacctgaccctcacagcccctccacccagaccttcctgcatgttccacccagcccaccctcctgcacccaagagcacccagccctcccttctgctcatgcccctcccttctcaaatccctcccagcagtgcagctctgggctaggacacagcctagggaacgtgactgagaaagagccaagaaaacttgatcagtgatcaagttggtgtttaagtaagattttcaataaaaagtagaattgggtactacatggaggcttgagatgctcagagcttttcgagaaagcagaacagaaagtagaagggcaaccaggaaccagaggtgccagagaactggaagcgcgggccctccgaggagacagggagtgggcacctgggtcttgggcctgtcgacaaaaagagtcaaactctgtaaaatatttgaagagacgtattctgagccaaatacgagtgaccatggcccgtaacacagggctcaggaggtcctgagaatgtgtgtgtgctcaaggtggtgtgggtgcggcatgactccccagaccccttagataggaatttggttttatatattttagagaagcatcagctatcaatcaaacacatttaagaaatacagaagctgagcgtggtggctcacgcctgtaatcccagcattctgggagactgaggcagatggatcatgaggtcgggaattctagaccagcctggccaacatggtgaaaccccgtctctactaaaaatacaaaaaattagccaggtgtggtgctgggcacctgtaatcacagctactcgggagactgaggcaggagaatcacttgaacccaggaggcagaggttgcagtgagccaagatcacgccactgcactccagtctgggcgacacagcaagactccgtctcaaaaaaaagaaaagaaatacttcggattgctccagaaaggtcggacggctcaaagtgagggcaggagtgctggggggcttccaggctacaggtaaatttaaacattttctggttgacaattggttgagtttgtctagagacctggcatccatagaaaggaaacgttcaggttaagataaaagattgtggagatcaaggttcttttgaagtctcatagtggctgcccttagagacaatagatgacaaatgtttcccattcaggcctttaaaaggtgcaattagttcatctgtttaggaccgggagggcctagaagaaaaagatccagctatgttaatagagattctttacagatacaaattttgccccacaaaggacaactttgcagggccatttcaagatatggcaaagaaacatgttttggggtaaaatattttgtctttttactttgtcacataatgttgtgcctgagtcagattggaaagtaactcacaatatatagggttaaataaaacccatgtgggccgggcgcagtggctcatgtctgtaatcccagcactttgagaggcctaggtgggtggatcacctgaggtcagcagttcaagaccagcctggccaacatggtgaaaccctgtctctactaaaaatacaaaaattatccaggtgtggtggcgggcacctataatcccagctacttgggaggctgagacaggagaatcgcttgaacccgggaggcgaaggttgcagtgagccgagaccacaccattgcactccagcctgggcaagaagagtgaaactcggcctccattaaaatacaataggaaaaaaaaaaaaaaaaatagaacccctctgatgaggatgtacgggttgtaaggcatgactccccagaccccttagataggattttgggcaagattaaataaaaacaaatcagagcttagtccaaaggcctatgaactaaaaataaagtctttagcccccaccgatcccccccaactttggcccccagtggccaggggtatctcagaaaaaccttaaaactgagttcccagccatgatgggaggggaggtcaggcacgcctcattatcaccccgcccttttgcagtttagacacaactgaccagcagtaatgttaaaacagaatcataagatgggcagaaccagaacagactcttcatggcaatcagataccaaatcacaaccaggacctcaggccgtgccaggcaagggtgagatcacacaccccacacttaaacagtcaactctgttctgcctgccccaaggttttttttttttttttttttttgctctagcagctaaacaagcactgcctccagataaagatgaaaacaatcacagctcacccagcgcccggacgcggagcaacagagcccctgctccacagccctaattccaggtttccctggacaagagactgatttcagtaactttctccagatcggaagaccacggaccacggactagttctgaatggtttacagacctggcaaattttggtgccttcatgtcctgaaaggaccttttgacatacaggcttaattgtggtacatttaaatgttgtctccaccgcaatgtgaggacggattatacggttgctttttttttttttagatttttgtttgtttgttttttgttttgagatggagtctcactctgtctcccaggctggagggcagtggcgcgatctcggcccactgcaacctctgccttctgggttcaactgattctcctgcctcagcctcccgagtagctgggatttcaggcacgtgccaccacacccggctaatttttgtagttttagtagagaccaggtctcaccatgttggccaggttggtctcgaactcctcactgtcatgcgtgtctgtacagaaaaccacctaaacaggctttgtgtaagcaataacgccatttattcacttgggtgcaagtgggctgagtctgaaaagagagtcagcgaagggagataagagaggggcagctttataggacttgggtaggtggtggaaagttacagtcgaaggtggtcatctgttgtcagcaggggagggggtcaccaggtgcatggtgggagaccatgagacccattgtccagaagaagaatgtcataaggtcgattgatcagttagggtagggcaggaacaagtcctaatggtggaatgtcttaaggttggttaatcagttaagggagaaactggctgtttcac

SEQ ID NO: 96102 - DNA, 27514 bp, Homo sapiens
  misc_feature (1)...(27514): n = A,T,C or G
gcccctgggacagaatcccaaccacttatggccctgagctgaaggggctctccactccagctggcttccaagtcagacattgtcaccaacaggacaaagccaagggcaactctggaggtggcaagtaaaatttaaagtttcccttttgggtttaagagctgcctactctgtgctaatctccttctctaagcaactctcctccaaatcctgttgggatccacacccctttatattacttaagggactaattaccattctctcaccagtccctggtaatgtctagataccccacacctccttggggcaaaaatatgctttccaagatggatgcctacttaatatttagcctatctttgaattcatctttccctctgatagccctatttctcccaaaaagctacctaaatctttaacctaaacatttctacctcaggggtttagaaatagcccactcttactcgaaccagccctagcaaaaaaatctaactgagcaatctcttgagagggataacttctatagtatgtagacaatctctttatctgctctcacttcatgggacttgcacagcaacatgcagtacaatgcttaactttctaacagaaggaaaattactttgttaattcaaaggctatagagataaagaggtatttttggtgaggaaggttataaataaaagagattttatatgagaaaagttcttgtatggtaaattcttgtcctaaagtaaaatgactggttgtttagaaagagagatgtttaggacaagtcagaaagtccaagaatgttgtagatggtttgtgtaagttgtaaaaagattcgtgaaagggaatttgtgaaagaaaagttatacaattttaaaggttagtaggtctactaaatgctttaaggtcataagcaactactatgactcttaactgtgcaacttgcctgctttaaagctattaaattctaggtaaggtcctgggacatacagagttagtcacgccccctagctatgctggaaagtcaaaccttatctgcagttctgtctggtgttctaggctccaaacctagtacataattagaatagcttacttactatgattttcaccaaaagtaaaagttgctaagagttaacaatgtaacatgtctagaaaagcagttttacaggcaaggcgtataaggaaaatagaatgtgcttttggtaaaaccttataagaaggcttggtaatgtagacatttttgcttcgtttagagggttaaataatggttttaagttagatagaatatagttgaagatttgagcaagttgtaggaggtctgtgaaagactaatcttgtaaaagaaattctgcatgtgaacatattagctaaaattaaaggagcattattaagtttatccataaattgaacactggaataaacttacaacatggttttcttagagcattgttctgttctttaacagaaaattgtaaagggttgaaaaaggtttataaaaatcttaccttatggtcaaactgattaagattggacagatttatctacaaagttttattaagaattgtgtttaacatcaatagtatactaatgcaaaagtaatatttagccaaaattgtgtaaaacccttgtaattctgatatgacttagtatatgttaccagtgataattgtaattgttatgttaaattattgtgtgccacaaagatagcaaatttccttgtcagttgcatctttggccgtggctgccctaagactttttgtcatccacagaccattattgtcttcttttgaacctctgtaaaagatggttttataatcgctgtaggaccctaacaggtgctcttaaatccaggtttctgataactttggagattgtgacattagaatagatgaaaaaactttcaggactctcatggagagctgaaatattcatgaatatcaagcagaataggagttaattgcatggcctgaactaatagaagactgaaataatccttttgtgactttttgctgaaaacattgctgatcctttgtttttcagagccaagaaaacttttctcctgagctgtttacagcttttaacaattaagtaaaatatactgctgtaagcaaaatttggagcatgtttgtttctttctacgtgatttctttagaatttggaaactatttgtgagtattctaaagttatggcaatatagttgtttgcataagtgcaataagaatctgtttccttttgcaacaggacacaattggagaaactgattattttaccaaggctttgactagaatggtgtgctttcctttaaggaatcaaatttgacttacagagccaataaaaaccccttgggaacacttccctcatagcttgtctacacagttcttgtacagggttcttgacttgtggtaagtagagaatgtcactttctgacaggtccaggagcctcaagttatcttgggacctctagaggagaggaattcacccaactcatacaggtatttgatggcacaaacccatggcttgtcttaaggctttaaagtcttatctgggattcctcatggaacagtttcatcaaaacccattttaaaaggagattatatggcaaataattatttttactgtattctatgtaaataatcaggctgagtataataagactaaagcttattttgtaaataagtcagtcctaccatgatttgtttttagtaaaaaaaaaaaagggaaattagagagagaaaaattatgtttcaagaactatggtatacctgttattagattctagtcttatcagttgcttttgagttttttccccccacaatttagactgaccctgcttattcctgtgaaccaaccagtgatctctggctgcagctcagaagaaacaagaaggatgggccatcaagctccagatgatcctcagtgaggaataccatcctctcaatattcaggagtcacccttctacagaggacccctagaatgctcatcagtgggacacaacagaggtgaaattctgcccctgcctcccttggacctggctgaatactgctttcaccaacccatggagccaccctgccctgacagctagcaagaggccaagactcacagaacaaccaccactgcccatctgtcagcaggaggtagctataaaagactgatctttgtccattctccccaaagaattgggagttttggatgaactcttgatgggggaagtgtttacagtaggtagtcaggtagacatgaacaggataggagaggccccccactcaggaatgtcaggagaccatcaggtgatggtcagacagttgttatactgtctctctaaaataataattggtcacagctgatgccagggaaaggctgtctcccaatagatagaaacacctgaagctggtgatcagcagcttcttgataagatctcaggagttgggtgagtgggctcaagcatgctacatcaagaggcaaaatgttggagtttagtatatgaccttcttctaggaatacttgactggtaaaggaagaatgcctcaagtgagcctgtgtacaactccagtaaacacactgtgcatgcagccccctcccaagtgctggcaggccactgtgcatgcagacagcccaaggtaagaatcaggggagaagtaacacaaccctggaagcctggcaacatataagacaccaagtcaaaggtcaaactgggcagttgatctctcaagtcacctgcttggccctcttctaagtgcactttactttctttcattcctgcactaaagctttttaacaaactttcactcctgttcaaaaagttcccccagtttctcactctgccttgtgcccctcagtcgaattctttcttctgaagaggcaaaaactgaagttgctgcagacccatatggatttgctgttgctaacatactttggtgcaatgtgactcatatgttccctagtggtaacatctttaggtctcagatcctgatagggaccagaaagctctggaattctctgtgcaacaaaagattacatcagggacagaacgcactcccagctgaagagtgactcaattattaggttggtgcaaacgtaattgcagtttttgcattgttgaaatttgctgtttgatattggaatacattcttaaataaatatgcttatgttggccgagcacggtggctcacgcctgtaatcccagcattttgggaggccaaggcaggtggatcacgaggtcaggggatagagaccatcctggctaacatggtgaaaccccatctgtactaaaaatacaaaacaaaattagccgggtgtggtggcaggtccctgtagtcccagctactcaggaggctgaggaaggagaatggcatgaacccaggaggcggagcttgcrgtgagccaaggtcacaccattgcactccagcctgggcgacagagtgcgactccgtctcaaaaaaaaaaaaaaaaaaagagaaaaaaaatatatatgcgcttatgttatatatcattttaatgtgcatttcttgctttgcattttttttggctaaggacttgttacttgctgtttattttatacttattttagactatggaaatggtgttagacaaaaagcaaatttgagcgattttcttatttgagttcaaaatgggttgtaaagcagtgcagacaactcacatcatcaacaatgcatttggcccaggagctgctaacaaatgtacagtgcagtggtggttcaagaagttttgcaaaggagacgagagccttgaagatgaggagtatagtggctggccattggaagctgatgacaaattgagagcaattatccaagctgatcctcttacaactgcactagaagttgctgaccattctacattcagcatttgaagcaaattggaaagatgaaaaagctcaataaatggatacctcatgagctgactcaaagtcaaaaaaattattattttaaagtgtcatcttctcttattctatgcaacaacagtgaaccactatccagttgaatcatgatgtgcaatgaaaagtgaattttatatgacaaccagcaatgaccagctcagtggttggactgagaagaagctccaaagcacttaccaaagccaaacttgcaccaaaaaaaggccatggtcactgtttggtggtctgctggtctgatccactacagctttctgaatcctggcaaaaccattacttctgagaagaatgctcagcaaattgatgagatgcactgaaaactgcaacacctgcagcaggcattggtcaacagaaaaggcccagttttccatgacaatgtccaaccactcattgcacaaccaacatttcagaagttgaattaactgggctttgaagttttgcctcatctgtcatattcacctgacctctcaccaactgactaccacttcttcaagtatctcgacaactttttgcagggaacacacttccacaaccagcaggatgcagaaaatgctttccaagagtttgctgaatcctgaagcatggatttttatgctacaggaataaataaacttatttctcattggcaaaaatgtgttgattgtaatggttcctatttttattactaaagatgtgtttgagcctagttataatgatttaaataatttaattattattatattattaatactatataattagtcatattctgtattccaaaccctttctttgaaaactcctacgttccctccacaaattgaagagtggaattgctttctactcttcccctgctagcatggataataaagacatcttgctccctcttatcataactattattattttgacktctttccacaagcagcaagcagctggactcttttgctggttatgcttgttaagtggtatgtgcagcattctgcagaatattattcagacaacaagtcctgcacttcccctaggtttcctcccaagttgtgggtgaggccttttctgaaaccctcctccaacctttctgaattctggggctataaattccaggaatctttgwgttgttcagatagaatctgcagtgcctgaaatccagcctgctgcttactcacatcctcrtactcagctgcagactgcctgacagaagggctgccaaactgcactccagacagacaggtgcacagccaggtaagcctgggccagcatcacactgcccagggcaggcatgatgtggctcaggctggggctgccttgcctcactgccttgggttgggtctataatgactggaactgcccatcttcactcctgttyactttttatgttgatgctctttcttcctgcctctatgtctgcagctcagtctatttcttctttgattatcaatacaaagctcttggggctatcaaagtcctttggaccacccaagtcaaccccttattttactgtgatacagatggaggcaagaggggaacagacttgtccaagatcacacagcttctgctgatatctccttagtgctgatgaaaaagagtcaaactgtaaaatatttgaagagatttattctgagccaaatgtgaggaccatgacccatgacacaggtccaggaggtcctgggaatatattcccaaggtggttgggttgcagcttgattttatacatcttaggagaacagaagctacaggcagagacacaaatcaatacatgtaaggattacattgttttggcccagaaaggcaggacatcttgaagtgggggcttccaggtcacaggtagatttaaagattttctgattggcaagtggttgaaagggttaagctctgcctaaagagttgaggtcaatagaaagatatgtttgtagttaagataaggggagttgtgggagccaaggttcttgttaacgtagatgaagcctccaggtagtaggcatcatagataatagattgtaaatattttttatcagatcctaaaaggtgccagactcttagttaaatctctcttggatcaggaaaagacctggaaagagaaggggattttctataggatgtaaattttcctcacaagagacagctttgcagggccatttcaaaaaatgtcaaagaaatgcattttgatgtaaaatacttcagtttttttcaggacctgctatctgtcatgtgatgctatactagagtcaggttagaatttggtatcttattgctaaaagtctgttttttcagccctaagatctccattttactgttaatgctggtcagtcatgcctgaactcaaaagggaggagggtataatgaggcatgtccaaccctgtattcccatcatggcctgcactggttttttaagttgactttggaatgccctttgccaagcagaggagtgctttcagttggttggggagcttagaattttatttcctgtttacattattctcttttctgattttcaatatttctaactcttccatgtctctcattctttctcctctaatctttgttttcttcctctaccccccccacccctttccttttcccttctcttctctctttggaccagtgctgaaggccattcacctccaagatgggactaggttaagggtgtgcccattcagcttccccacccccaaatttgggcatctgaattgataagcatggaaaggggtatcagagtgggcagtgccaggctcagggaccattctaagctcccaggacctgtggtcaattctgctgcagctgaccgagctgactgttttggggaaagcataagtgagtggggtagggtgaaccagaggccttggaagctgctcactcttcccatcctcccaggcaaaagaggggctttgcatgggaaggggaagcaggggagacagaggaggcctgacttcatctctgcaggttgtttacctgcaacagtccaggcagagttgcctttccttacaataggtcagctttcctgcaaaccacattgaggcaagttcagacaagcagggcttggtaagaactgttagaggccagaaaggggacagccagacttgctgagctaggaacacatctcacaggtgctgttactctagccttccagcagggggcgtcctgtcccgacaaaaggcgagtcctctttttcctgctgtcctcccagccaaggagactggattcctctcaacctcaaaagggggttaatctgagctcgcagcagaaggagaggagttccccagggggggcataacaatgttcagaatctggtgtcctgtttagaaaaggtagaccaatcaggagctgaaaccccttgtctccacgtaatgcaaggctgtaaatatgaccttgcaggaaggagagaggcgtgagagagtaagcgagagcaacagcaggcagagtggaagcagctgggaggaaagagggaggaggtctaggacctacaaagattgtttttggaaatacaatatcagaagagatataaatcggaaatcaaggcttccttcccaaagcaaagcatttggtcgcctgcattttgacactgagtacagactgatatttaatagacagtttcttcacaattcctgagcagcacccattcacttataatttatagatacagacccctaactcgaaggaactgagttatgcaagagttgctaaggaacaaggggagatgcagtaggtaaggcaggggttgcttagtaaccaggagtcccttggtgatggagtggccagagcatgtctggaactgatgagggtctgtagacagagtcatcccaggccagagcctcctgcaagttcacatctgtcggccccttggcccagagctgccagagcctgcctctcttcaccttcctggcactgtcctgtcccacatgaaaagcacactgctaagtccctgagtgccctgctaactaaccccttgctggaaccactccttccctccctctctcaacaggaagctcatcagattcttccattagagtagggaatggcaggccaatgggaatcccacataggggaaggcaggagcctctgggctaacatgaatgtggagctgggaaattaggatttgggtgaaagagggtctcctagacaagcatccctggcattttccagttcatggtgatatatcttcatacctgagtctcccatgccagatcctctccctgccttcacatctgcgcatagctacagaggcacaccgttcccttctgaagggcctcctgagggcacaggtctccacacagcagcctggatgtctgtggctggtttaactggctcagctccacggacatcccttcagagagcttcaatcagcaccggcctgctggagtcattcagaactgcagtctgctttctcaggcatgagccccccattctctgtattccaggcacataggcatccctgctctctcccaaacaccctggacatccacaccctccattcttcctctcagcctgttccccttgacaggaggatctatcctgttgctgcccctgtcaaaatcctcctcagtcttgcaggtcctatctacctgcaactttcccagcctgattagctcaccagccttattgagcactcctgtgtttcaagccctgggccccaagagggaggagtggagcctgtgttcaaggaactcacatgacactcattactgatcctctgcttcctggctaggatactccatgaaagccctctgtgaactgaatgtttaaaatcagaaagttttgcttatttaaagcaaagccctttgcatagaacaactttgagaaagtatctgagatgctggcaaattttcttctgagaagggaattggaggatttaatttttgaattaagttttaagctgcttgaattttaaaatttaccatgagcaggtaatctttacttttaaacttttaaattgtgaattataacacatacgtaaaaagtatacacatacataggtgatataatatatcttcatggacatcatgtaggcatcacttgcttatcaaatacaacattgccagcacgctagaagctctttagtttgccccttcyttttttttttttttttttttttttttgagacggagtctccctctgtcacccaggatggagtgcagtggtgcaatcttggctcactgcaacctccaactcctgggttcaagcgactctcctgcctcagtctcccaagtagctgggactataggcatgcgccaccacacctggctaatttttgtatttttagtagagatgaggtttcaccatgttggctaggctggtctccatctcctgacctcaagtgatccccctgccttggcctccaaagtgctgggattacaggcatgagccaccgtgcctagcctgtttgcaccttcttaatcataactgcctccccacagctctactgcggaaatacccactctcctcacttttgtggtgatcactgccctgcatttctctgtatttttgtcacctgtttgccttcttaagcaatatagaattgttttacctgttgttgaaacttgtggactcaaataatatgtattcttttgtgtctgacttcttttactcaacagtatattttttaagattcctttatgttgttcagtgtggcttcagctcattcattttcattattgtatagtattccattatagaaatgcaacacagtttgtttatccattccaccgttaataggcatatagactttgatatggtttaggtctgtgtccctgcccaaatctcatgtcgaattgtaatccccaatgttggaggagggggcctagtggaaggtgattggatcatgggggcagatttcccccttgctgctcttgtgatagtgagtgagttctcatgagatctggttgtttggaagtgtgtagcacctccccctttgctctcacttcctcctgctccagctgtgtaagttctgcctgcttcatttcaccttctgccttaattgtaagtttcctgaggccttcccagccatgcttcctgtacagcctgtggaattgtgagtcaattaaacctcttttctttataaattacccagtctcaggtagttctttttttttttgagacagggtcttgctctctctcccaggctggagtacggtggtgcaatctcagcctaccacagccttgacctcctgggctcaagcaatcgtcccatcttagtctcccgagtagctgtgactacaggcatgcaccaccacacccagctaatttttatagagacatggtttcaccttgttgcccaggctggtctcaaactcctgagctcaagggatctgcccaccttggccttccaaagtactgggattacaggtgtgagctaccgtgcctggcctcagttagttctttatagcagtgtgaaaacaaactaatacagacttgtttccagtttggaacattctaagcaggcttctctgaacctgtgtgtacagtctcttggtgcacacatgacctcctgtctgcaggatgcaagttccctctacagagtcagagatctttattttcaacttctccgtataatgccaaatcatttcccaaagtgattgtacttaccctctacccagcagtgaatgagagtttctgttgattttgctttttcaactagaagtgagaggtgacaatatgctagcagcccttgctcactcttggtgcctcctcgtcctccacatccactctggctgcacttgaggagcccttcagcccaccactgcactgtgggggcccctctctggggctggccaaggccgaagccagctccctctgctcgccaggaggtgtggagggagaggcgccggcaggagcccacactgtacagggcactcaccggccagcaggggctccgtgggccggccggtgccagctgggcctgactgggggatgagctccctctgggctgctggagtgcctgggctaggtgccgcaaagtcctgcagtgtgtgccattgagaggtgaagccggctgggcttctgggtccggtggggacctggagaacttttctgtctagctaaaggtttgtaaatgcacccatcagcactctgtgtctagctaaaggtttgtaaatgcaccaatcagcaatctgtgtctagccaatctggtggggacttggagaacttttgtgtctagctaaaggattgtaaatgcaccaatcagcactctgtgtctagctaaaggtttgtaaatgcaccaatcagcactctgtcaaaacggaccaatcagctctctgtaaaacagaccaatcagctctctgtaaaatggaccaatcagctctccataaaatggaccaatcagcaggatgtgggtgtggccagttaagggaataaaagcaggctgcctgagccggcagcagcaacctgctctggttcccttccacgctgtggaagctttgttcttttggtcttcatgataaatcttgctgctgctcactcgttgggtccgtgccacctttaagagctgtaacactcaccgcgaaggtctgcaacttcactcctggggccagcaagaccacgaatgcaccgagaggaatgaacaactctggacacaccatctttaagaaccgtaatactcaccgcaagggtctgcaacttcattcttgaagtcagtgaggccaagaacccatcaattccgtacacattttggtgactttgaagagactgtcacctatcaccaagtggtgagaytattgccaagcagtgagactattgccaagtggtgagaccatcaccaagcggtgagactatcacctatcgccaagtggtgagtaccatcagatccctttcatttgctattctgtcctatttttccttagaattcggtggctaaattctgggcacctgtcggccagttaaaagtgactagcgcagccgctggactaaaaacgtgggtgtcaggctttctgggaaagggatctctaacaacccctggctctgtggagttgggaatgttgttttgcctggaaccagcttccgcttttcctgtacttctgggctgagctgagggtcaacagagaggaaagccattcagctccggagtccccacaacaagttggttgaccctgcggccatgagcggaactctcaaaggcatgttgcccaagtgagactcacctatctatcctatctatcctgacccttgctcgctgggtcctaatgcctgccagacaaactttctctctcctctcttctcctaggctagtcccacttctaaaaaaccactccctgtctctggtgcttttctaatttctcttataagaatgatttctagtaaaaatttcaggactctgttaccttctttaggcacctgggctcaccaatcagaaagacataatttttgcccaaagcccagttgtagggggaactatctggaattttagaatccctcctcagataagcaggtctaacaaaagctattcctgaagctaggatagggggagcctcagaaattgtatccttcctattcatataagtgaggacaaaaggtgtcacttttccaaccctggagaccccttccctccctcaggttactcttcttcatttttggggcataacatctttataggacacgggtaagttcccaatactaacaggagaatgcttaggactctaacaggttttcgagaatgcgtcggtaagggccactaaatccgatttttctcggtcctcctcatggtctaggaggacaagcaagggtgcagcactctatgtctagctaatcaggtggggacttggagaacttttgtgtctagcgaaaggattgtaaatgcaccaatcagcactctgtgtctagctaaaggtttgtaaacacagcaatcagcactctgtcaaaatggaccaatcagctctctataaaacagaccaatcagctctctgtaaaatggaccaatcagcaggatgtggacagggccagataagggaataaaagcaggccacccgagccagcagcagcaacctgcttgagtccccttccacactgtggaagttttgttctttcgctctttgcaataaatcttgattcactgctgctcactctttgggtccgcgctgcctttaagagctgtaacactcaccacgaaggtctgcaacttcactcctgaggccagtgagaccacaaaccctccagaaggaatgaacaactccagacgcactgcctttaagagctgtaacactcactgcgaaggtctgcagcttcactcctgaagccagcaagaccactaacccaccaggaggaatgaacaactccggacgggaggaatgaacaactccggatgggaggaatgaacaactccggacacaccatctttaagaactgtaacactcattgcgagggtccgtggcttcattcttgaagtcagcgagaccaagaacccaccaattccagacacagaagcagttaattaataactggtataattatttgttggtgcctggcatctcatttaactgggaagctgcatggttggggtccagggctgagtctgtcgtttactaaggtgtccccgcctctactgcccagtgcttgacacattgccagtgctcaatgtttgctatgcaatggatggaaaaatcacccttgtctaatgaatgttgagtctcacattttaatttgtgaataatttccccagttttatagcttaggagttttcatggattgctttcctgacctgaggttcacatgtttgaaatttaccctaaccagcctsactctctgccactttctgttgctggccttgtctgtctggaggaaggaggagggtagattaccttcatgctcactgaggcatcagtgataagtgaaattgattctttcccccaggcctgattcagcaggaagcatctcagacaccaaccactatgctgtcagcagttgcccggggctaccagggctggttkcatccctgtgctaggctttctgtgaggatgagcagcaccgggatagacaggaagggcgtcctggctaaccgggtagccgtggtcayggggtccaccagtgggtgagtgctggattgcccatgggtcctggcccctcacagggtccttgtggcttccacaaggactcagggttttaaagcaagacccagccttatttgctgatttccagagctgggtagaggaaggacagtggagagaggctgaggctgacttttgccctccatctctgcattcaggatcggctttgccatcgcccgacgtctggcccgggacggggcccacgtggtcatcagcagccggaagcagcagaacgtggaccgggccatggccaagctgcagggggagrggctgagtgtggcgggcattgtgtgycacgtggggaaggctgaggaccgggagcagctggtggccaaggtgagggggcaggcggtggaaggacacagagaggggaacatgcagaacctttccttcactgcttggcccttgtggggtgggtctagaatatgtcctgagaccatgactgcacccaggctgcccaagctaacctcgctacccagaaggtccctcaggaaagtgacctgttcgtgagaggaccctcaccccacccccaggcccngggagaatcactgtggaggaggagtctgaaggggtgagggaggtccccagagggactcctggagcagaccttcctctctcagtgcctggccccaggagcctgcccttgggacacctaggtcattttcctttaggagctctgcaagctttgcctgaaggccttatgacctgggctgccctgggaggganagtcctcctcaggccatctccacactcatccaatctcctctccgcaggccctggagcactgtgggggcgtcgacttcctggtgtgcagcgcaggggtcaamcctctggtagggagcactctggggaccagtgagcagatctgggacaaggtgagaggcctcccctggggaggcggctgagggcccgattccagctctgcactgggctccagcatgcctgtgcccaccaagactctgtttccctccagaggttatgggagaagcaggccctgggtggtagtcctgcctggccagctgtctcccaaaatgtgcccggatgctactttctggcttgttggttcttaaatctggcccccacactttctgctttgttttctcttctcatcactttttcatttaatcattcagcaggtatttattgctgtctgccaggcaccactattccaggctctagggatacagctgtgaatggttagtcagagtctctctgtaagagtcaaacatttttgtatggtacacccttttgtaggggaagatacggatactgtgtttttctttggtgacctgtgcctgtagcggagactgtctctcctagaagggggctcctcactgagtcccacacaaacttgccgacaggaccagatccagccatcagcattccgggggcttagacatcccagcctgctgtaagtccattcaaggattctgctaccttgtccacaagggaccgggagagaccttgtaaaatgccttgaagctcatcttgggcctagttgttccccagtgacttctgttcccttcactctcatgttttgttttctgttctctctgccagaatgcgtcgtgatgaatctcattctttctgctattgtgagcattcaccactctgccctaagcactgggtcaaagtgtttcctgccttctggccttagagtgttctgccttccctagatcctgcactctcacttgccaacatcatcttcaggctggcccctcccttctatctgcccttggctgggtgcccttggctacatcctcagagatgatctgaaatttgagctccctgcagcccctgctgagcagcttccccaggctctttagctatgttgttaatgcctccaaaggatcatttgtgattttatagctgggattttattgctgacagtctcctaaccctcctgaatcattttgctgtttagtgtctcagttcacaggatcatgactctttttctcgaaactgttgcagtcctccctcctgaagctgagggcagatgccaacaatctgaccttactttctctgattctcccctgttctccaaggacttggccttcagtgagcaattctgtaccactggacagaaatcattgatgactcgtccccgatcacatctgccatcacctcagaggtgaaattgtcacaaaatgagtttagaatttaccagatgctctgctttcaactaaatgtgttttccgtaggtgtcctgtaaggagaattccttaccactcatcttattcttgagccagttttgaggccatctccaggcagaccccccttctttccagcaggttgggaaacctctgatctgttaaactaccaaaaccacatcacctccatccttctccagcgactccagcgtgcgccctctttcaggctcatggatagttctctgctcagaactacttggcacactgagctactctctcttactttctaatggggcagttttcttcatcaagggagggagtctcaccttttctttggcttggtttttgttcctgagtccaggaggggtcttacctcagcccctcactcagcctgatgcacatggagtattggacagatatcctgtgggctggttggggtctgttttgaccaggaaacccttacagctaacctaatcctcaattccttcttattagggacctcagggtggtacccacttctgacatctggaccacttcttgcagtcattgggggtcatcccccacactggtaacctgtcatcaaatgggccacagcaacattcagcttaagtatttctccttcccacatccaagggattgagtgggagtgagattggggggtggaaaaaacagtgaacagtcctggtgagttgcagatgtggtctcattccctagagatgcaggatgcagctgacctgaatcaggacagatccctgcaggagggactcctggtgccatgtcagtcccacctggcactgccctagctcccaggctccgcctctgcatctttccttgctacttcctctttcacttctcccccgttcccagacccaccagacagagcttccagagtgtcaggacatgtgtgacttagcccagattcagactttagtcacaagcaggatcagcatagacatctagctcccagcatggcaattctctgttgtgtctccctgtttgtattggctgcaggaaagctcagagccaagtctgcgataagctggtgtgtgtaggcccttacagcctgcatttttatgaccaaataatagaataaatgctcagtccttatcacatgctgtgaactgtaggcaccaacctcactcttgctttttcttatttttctacactgatttttccttttctccatttcttcacacatagtacctatttgatttattttatgctgttgcattgtgagtatgccttaaattctatggggacaaggtaagaggacaagcaaatgaaagctcagagagacaaaaaaggctcttccagaaatctcccttgcttctagcacctgcttcccctccatcaggctgtcttcagtctttctccagaggcctctgcttacagtgtgttgttgttttctttttaagagacagggtctcactctgtcacccaggctggagtgcagtggcatgatcatggcacactgcagcttcaaactcctgggcttaagggatcctcctgcctcagcctcctgagtagctaggattataggtgtgcaccaccacaccaggccaattatttaaaaatcttgtagagacaaggtctcactatgttgctcaggctggtcttgaacttttggccttgagtaatcctcccaccttggcctcctaaagtgctgagattacaggcatgacccactgcccccagtccccattttctttaaaaggcctgaacatttccttcctcgtgtcagtcctgaacaattcacattttcagggctctgctcacaggcctgtgacttagcctgcctgcctatgaaaccattagcaaattggaaatacctcttgcaccagtcagaagggggattggtttctcttatatgcacatacattgggtctactgcacaaattacagggctccaagtgtcttatgagagcaggacttgggctgaccatgtctctctgccctcacccatgctctgctctgatttcagatcctaagtgtgaacgtgaagtccccagccctgctgctgagccagttgctgccctacatggagaacaggtatggcagggcrggggtggggaccagtcggagttggggacctgaggtgggcacagaaatacagtcggtagcacagccagtagtgggtagaggacagaagagktctgggatctccacatccctcatcttcttgtcctgcctccccatctgtgtggctgycattcccaattccagtggctgcaggatgagagtagtattccaggggcccaggcatagcctccttggccttgacatcagcaggtttgggacaaggctatgctttaactccttgaccttgtgggctggtcattgtcaccttacctgctctctgttcttaccaacttaaaaccaatgacagggttagccccattcctctccataggaaaaagcctgtcccagacctctcctcatgcctgcgcttggtctccagggaccctgcctgtgttccaggtcctgcagatctgactgtacccctcacagacacacccttaggaactggccaggggctgtcttcagtagaaggaaagttcctgactgtcacttctggtctcccttaccccatctgctccttagaggttgctcattgataggcactcaccatcagccttgggtgcctcttcacaaagcccaccctgccctctccttcaagcacctggcaagagaggaagcagaagataagggttctgagcatggacatcgtatttatgagaaataggcatggaatcctagctctgccgtgtattggctggtactaaacctttctgagcctcagttttctgaactctgagatggggacagtaataggacctgtgttgcttctgtgagggttgcatcatttaatgaactcatgatagtgtcaccatcagtggtaagctcttagcttcagcttctcttatgtttgtcttgtctcaggaggggtgctgtcatcctggtctcttccattgcagcttataatccagtagtggtaagtgcttggtccttgtgctcctgagtggtatagggtgaggggcaactttgttcttttcctcagagccttacagacaaagtgcctgggacagacccccaccatcctcctgctgccctgggctgagcttgtctccatgtgggtgggagggctgctgggcctgtgagatccctgtaggtgagaaatccaactgatgctttcccccactctcccatatcctaatcactctgtcaattcccttcccaggcgctgggtgtctacaatgtcagcaagacagcgctgctgggtctcactagaacactggcattggagctggcccccaaggacatccgggtaaactgcgtggttccaggaattatcaaaactgacttcagcaaagtggtgaggattgggtgtgtcttccatctcccagtctggctcagtgggaacccttcccagtgaataagggatcaaggggtgactgaatccttaggtcagcatgcctatgactgaggtcctcattgttctctgaactcagccatggtgcagtccatccatcctgaraagatgctccttcttttgagaagggcawagctgccctaggtgttctgcctggtggccttcccggggccctgcccatcttgttttagtagcactgactccttcatttcttccctttgcccagtttcatgggaatgagtctctctggaagaacttcaaggaacatcatcagctgcagaggcaagtggggtttggagatttggtggtccatgtgtggctaggcaggggcagttgagtctattgcaagagcagacccctccctgtcatctggccattgtttttgctgaaatctggagtccacatggccctggagggtgcaagtagccctgctgcatccaccttgttccccatggagcccactcccacctgtcatccgtgagccccagagcagcagaatcagagtacaagatgcttgacactgtgtccttcttccatccaggattggggagtcagaggactgtgcaggaatcgtgtccttcctgtgctctccagatgccagctacgtcaacggggagaacattgcggtggcaggctactccactmggctctgagaggagtgggggcggctgcgyagctgtrgtcccaggcccaggagcctgagggggtgtctaggtgatcatttggatctggaggcagagtctgccattctgccagactagcaatttgggggcttactcatgctaggcttgaggaagaagaaaaacgcttcggcattctccttaggacttatctgcttgtagatttggctgatccaattaacatgtggggttcttggtgtgggtctggggagctgaaggattttatggagctggtgctttggaggaatcttaagggaaaggagtrgaagctcaggcctttgaaggatttcagctcctcctctctgtaatttgtgctttaagcattttttttcctaaaataaactcaaatttatcctcaagtctggaagcatctgtcaagggtagagcccagggcagcatggtgggaagaggcctctaccgccagctgccctgagctcgtcgcagacacacagaggcgggagtgagtgtgctgccttgcagaaggctttgtgtgtgctccattatctgaactgggcctgctgggggctcagcaaggtggtggtgggtgacagtggaaagattctggggttctcccaggggtcctccaggctaatacttcttaatgttttctgggccacacaggcctttgagaacccagagaaaacagttataccgaatcttgtgcataattccagttagaggagagtagtcagagctgaagttcctcttggggtgaacacatggctttcttattgtcctgagtcatattcgggggcaccgccctctgtgtatgcatactgaggctcagcacagtggagggggaacagtggtcctcgagccatccgtggccctgagcaccactcttgccacccataaatgttgtcctgaaccagtccagagggaggaactgagacaaggcttccaagctgacccccggccttggtctcatggaagcccttcagcaacacctcctctccacaccagccggggacgggtccttgtggtgtgaatggttcaattacaaaagcatttgtgcatcttactacaagctatgcattgtgccaggcaccctggagaacacaaacgtaaataagaccaaacctccctccagttccttcagtgtggtgggaaaacagaaggtagaatagtcatcagaaaatgaggcagaacatgtttattcatttgatacatttattgactatcattctgtgccaggcactgttctaggagcttagggtacagcaatgaacaaaacaaaatttgctgccctatgagctcacatgctagtcaggagaaactacaataaataacaaactatattatatatagtgttactaggtacagaataaaaaagataaggagtagggcagaggagttgagggtgtgggggttgagggcaagccagggtaggcacatcatatgcaaagcatcacaggaccgtggaggaccatggcttccagtgaggctggtggaggtgccattggagctgagacctactcattaaacatacgaacaaattaggttgcaggaatgctgtctttcagtgggaaggccaggatctgaacaggtgggacggttaatggtgaagggataaatggacctctggaatcctcaagacatgggaagtaatattatagtaatggacaagaccagagtccggatgtgtttttggccctccagatccactccccacccttctctgccctgcgtggtgccaggctgacctctgtactgtatcatggaggctcccttgccctcaggcttccactcagggttagaactggggagggcacgtgtttccctggccccctccctgaaggcagtgtctgtgtccacctatgactatggctcctgtgaggccacccccaccccctaatcaccaactggctccctgcttggtcccttcaggctaggaatgactgttgctggttcctggtgcttcactaccctttgctggttcctttaatcttgcccacctattattccttcatttcattctctttaactcctttgaatgtggcctgacaaggaagccacagccaggtcagggtggggcaaccctgataggtttaactattgaaatctttctaactacccccagccagactgccctggcctcttccttgggttcctctgggcattcctatgactcagcagccaaagggtgaaggggtgacacagcagacttgcctcctttgtggcccaggccctgcagtagagaaagagcaaatgcaagcagatctctggaggtgccagggacctgcctgagatcccctgggcatcacctccctcctcctggccttctacagccaggctcccgctcctttccaggaactccatggaaaggaagaggaacagtcatttggaggtgagcggtgatttctcactggatcagaaaccactttttacagctccccaatgtccctacttccaaaactatttctggatgttgaggggggagggtcttctggctaagcagtgcctggccctgcccgctgctccttctcttcccactaaattctttctttcctccttcctcatggaattgggccacctccagctcctgtgctgggcctccctaaatccagctttccctgcctggacatctgtgccatatccaggctgcccactctggaaggtgggcactaccatgcatcagcctcaggccacccatctccatgggcagctgaaggaatgcattcttatggaagcacacccctcagcctgggttctccagaaagcagagccagatgtcaaggcttctgtggcttctagaggaagacaggaagagccagaattcaaatgtggtcttcattctgtagccctccatgagtcttgctgtgagtggcatcgtcactgcttggagtaagtcccctggtggagtccttgccccaaacctgccctgactgggaagtaagattgagagcctcagtttctgagaaatggcggtcccccaaaatccttcctgacttcaaggtgtgtgattctcatctaatattatttggttgacagccctccctcattgagcaaatgagtgtgaatccctcctatggcagtgtgcggtgggcatcccaggttcccaagggagatttgaaccagctactgggctaggtgcaacttagaaagaatcagggcagaacagaagagtgtctgagttacccagagccccatacagtttccagtgggtgaatttatagtggaatctggcaacatagacacatggtttttctagtcaaactcagcaactccggattgaggatggaggaaaatggataaccaggtcttcctgggtttgggacatgtccaggccacagttcggtgccaggatgtcacctgacgtggcccagtggagggatcccagtacgggggatggtggggatccaaattcttcagtgacccaaaagcataaggtctcagcactgaggcttcagtcagtgtggggaaggttctacgacctggatgagctggggagacagagcaaggtgtagtaggagatgcagcaggcaatgggaggccaaattctccaggtgagaagcccaggcccagagaggtgactcactcaaaggttctgcagctctggaacagccaaggcagtgaatacggccctgccactctagcttcagcaccatgaccttctcctccactttcaggggctgagtgcagtgaaagtaaccaggtaagatgggacaatgtaggcttgcaggagagacactgagagtggagagattggctgcagagaggctggtggaaccgcagttcgaaagcagggcaggggattgatccctgtcctccctgcaatgagagtagggaaagctttgacttcctaggtaagagcagagagatgtcaccaagacagaaagccccatttctgtacacagtggggagaacaggactttgcacacagccaagcaatgctcaaaggggggatttggagtcctggtgacatgtgtttttgtgtgtgtgcaagtgtgtgtgtgtcatgtgtgtgtgtggtacagtagggctgaccttagcaaggggaaggcgttggagaaagtgcagatgaggatgtgggaggtgtggagggggatttgcacttgatttatggctcttgcctcttcctttgttgaaatactcatcctgggtccaagctgagccaagccttgcggagtgaggagtgggggamagacagaagggaaggcctttgtgctctgactcagctcctccaccctgccatgctccttgggctgtccagtgcctcacagccccctaagtggacagagtgcagtgtctcgtggcctaactgggtagggtgaggacaagggctgggactggttgagtctcccatctccttctcccatagtctttctcaggccaagtttccagcacaggggctatgggttgtgcataaccatgcacatgtgcttccttgggataaatcacctcagtatttatttggtttccagtagccttgggcggtactgagactattacctgggctaatcaatgagaaacaacaaacaaaacaacagccatagggtttctgccggcttggaagtgtctgggagctgggcaggaggaagaaatggaaccctggaagtgatggggcagtgagtgggactgatgagtttacagctcttcaggtgtgggcagagcgccttaggatgggtcagactctgggggctggagtcagaatagcagactctccactatgggagcactttgttgcctacttgtacatttcaggttaattcccttatctctgatctcttaagagaaaagagaaaaagtcccagggctatgggggaattctagagtgtgcaggatggccacagataagcattctggtaaactggggtgatggcattccagcctgagggttctctgtctggtgactccccaggcaacccatgcttgtttggatattatccccaccccttggaataaaaagtggtacaagctgcaacccctgtttttgctttttccagaccactgtgtggttgggggagatcctcttgtccactgcaatgtagcactcacctcggcactgcgtatctccagctgtccctgcccatgttccgcttgtgaggctgggctcgcccagcaggagggaggtcagggcagtgccagagtgaggaacccagtgctaaattgtatcagaaggtgtggtcccagggtggcttgagacagtgtggctgtagctgaagagtagaacgtgaggttttacggaggcttggttctgtgtggtcaggtgagaacagaaatgggtgcatgcctgaggcagtgtgtattcactgttgactccagcagcaaacatcctggattagattttaccaagaagatgagttgtccgtccaaagcaaatggtccctttggtcaattatatagtgggggtaagcactggctgactgacaaagtgaaagagtgacaggagtaggatggaaatggaggaaaggagtgatcacaggtcaaggttcagaatgaaggccacaagccacagtatgcctcatgcttcctcgtgtgtagggctgggagagtgtgttgaggcaggtggaggaacctgaaggagcggtgcaggccatgactattttgtgtgccctggatggctggactcaagtttagagtttctgtccctttagcccttgaaggctaaaagatgctgtmccctatgcaggcagcattcttatgaatcctagtgagtaaaatgactccccttgctgatcattttatctgtgacttttgatgttttctaattgctacccactccagagaagttaatttgtggatatacatacacagcttgcaagaggcaaagctgtgatttgaatctgagtctttttcttaaccatccttcatgacaaaatgatggccaaggctctatgagcccagttctctcctctggctattccgtcctgttctgtgtctcttgaaagcagagcctgaggctttcaatatttggacaagatatgagagggagcgtgagtgagggagggagtggtgagagagttagggaggcaggaaagccactacaggggtacatcatggagggagcccccacatgcccatccccctaggacctcttataagagtgtgggatgcctctggaagagtgggatggcagatggagcattcatccatgggttcttagctgccacctatcaagggttgcctcggagttatcagctccttcacaattcccccaacagagaggaagatgcatccacagtgcaatgagttgagacccacaggaaatggcccaccccagccatgtctgaaatcaggatgagggcaagagtcagggcactcaatacatctgctacaaggtctctgggaagtaacagtccatgggctcaaatatgtttaaaaacaaaacacttgatccattgctcctgtgagactc

SEQ ID NO: 96103 - DNA, 24215 bp, Homo sapiens
  misc_feature (1)...(24215): n = A,T,C or G
ctgaaccaggtataaagacggtctgcattatatgtttacttttccagtccaattggatgccctccaaagatgagagagggagacacaatatgaagagatcatataagccagaggagacagtgggagcttagagttgacttagtttttaaagagctttccagtttagtccatgtgattcccctccacctactcttttccccttatctaatcttgaacaattaaaaccagcaaatatatttcttacactagaatttacattaaaatttcactttacattctacagtgtttcagccttgcagtcctgtttaactattggggcctcgttagcgacttgtttatttaatagtctcagcaaaactaagaaataagcaaatattctgaatgctgcctggtctgcagttattctttttaaaaaaaaatttttttaaagactagtcaagcatagtagtgagaaggggagaaagtagaacaaggagtttcagatcaaactcctgactgtgaacaatcggttgagataactccctaccttcgggccagccatgcaattactcttaatacaattgtaccacagaagcattgctaagaacacagaccctggctctgcctctatatttaaggtaatggagcctttattaaaacggtccacagtatagtatacttggtaaagctggtaatattggttatatgtgacattattcttttcaggatgtcttgacccccacagattctctagaaataaatcccctaaagcagtggtctttaaccaggggtgggcaacagaatcaccctggagattttgtgtagtcagttggtgatggggcttggatatgtgcatttactctagctcttttgatgattctcctgtgtaccctggcacttaagccatctgcttataaaagataattcttattcttattctttttttttttttttttgagatggagttttgctctgtcgcccaggctggagggcaattgtgtgatccaggctggctcactgcaacctccacctccttgattcaagtgtttctcctgcctcagtctcccaagtagctgggattgcaggcatgcaccaccacacctggctaatttttgtatctttagtagagacagcatttcaccatgttggccaggctggtctcaaacgactgacctcaagtgatctgcccgtctcggcctcccaaaatgctgggattacaggcatgagccaccacgtccggcctgtttttatttcacttcctaaaactcaatgatgctttaaaatgaaataacaatagtctttctctggactgtaattacagaacttttggctcctagtgcttctacgccactggcataattcagagtatgcttttcatggtgattatgtttgttaagagagattgggtattcagtgtattagggagaactatagttctgagtttgtggcttaagtattctgctccctttgagcctttagttcaatgaggcagtcatttgtgagcttgtccaaagtaattttgcagaaataaatgcttgttttgttgattatctgctagctccttaactgtttatttaactgccattcaatgtcaatctactgagctacttacatgcttaagagttctgtgttggtcttatgaaatcaagtctacatatatttatctggtctttgtgctcttcccaagaacctggcaggaacatttttgtgggtttcataaattataccccagttcagtgttttcacattcagccatatatactctcgggggagtataagacattccaaggagtttcctgatggtattctggacaaaacagttttataagaatgaaccgtcagctagtcaacatacaaatgtactttttactgaaactgatctgcctatattctagcccttcttcctacctcctctattgcaattgcccttttgcaaaagatgggcacacttacctatccaaaacctgactggcaccttatcctatggtataaaaacctctgggcttgaaacaaaggagcacttctaaattttggtaccagaacccaaagtatggcttctgtctttttttggcttacacatatttctattaagcgtgaactgtggcatgataaatgagtattttgttccatgatggaatgttctaaattgaaatatagattccttcagttataggaaatgatgacaattttccattaattttttcagttcttccattcctcaatgatcgccaaagaacatattcccccgaggaggagtttgagagttttgttcaaactcacaaaaaactaagacagctcaactgtctattggagatcctctccatgggaggtttgggcagaaggacagtgatccagatggaggtcggagatgagaaagaggagcaaagaaagtaataaaagcatgggtaaatatttttttaatgactataaaaagtagtaaaataatgatgcttattgagattaaaagatacatttaatacactagacagtaatagcatatttgtcaaaagaagggttaatggtgttaaagcagtctaaggtccttgagttatccagaagacaatcattttgattaattttatattttagacactgtatgttttaatttatttaaaataataaaactaaagagtaaaacatctaaattagaggggaaaggtgaaataaaaaacatttagtaaatttcacagaaggcaggaaaaggttttaaaaaggaacatctgaaacccaaattaagataggtttaaatccatcatgaaggttatatgatagtggaggaaacaaacagctaacgagtcaagtgaatatacatgtaattttacatagcaatatatactatgcagaaaaacccaacagggtaaagcattagatgctgcctaggaggagactatttttaggtaagggaagacctaagatagaaagaggaggtaagtaagactccaagggtttttatcgtgagcaataacaggttgagaagggaagaggagccaaggagactgaggagacagccagtgaaatgggaggaagtgtttcaagaaggatggtatgatcaactgtgaaattaagaatgcttggcttatttactacaaacatctctcccagacctggaaacacagccagtagcaaggtcagtattaagttaccacaaggccaggcacagtggctgatgcctgtaatcctagcacttgggcaggccaagaaaggcggattgcttgagcccaggagttcaagagacccgccatgggcaacatggtgaaattgcatctctacaaaatgtacgaaaaattagccaggcgtggttgcacgtgcctgtagtcccagctatctggaaggctggggtggaaggaccacctgtactccagccttggtgacagagtaagaccttgtctcaacatcaacaactgcaaaagagttaccatagactcaacaggggacatataaatctacagcgcacagtggctaaacgcaagggttctgaggccagactatctgaattgtggtttaacctccttctagttgtgatctgtgtgatcttgggtaagttatttaatcactctgtgctttggtatcctcatctgtaaaatggggataaagaatttgtttcctctagttgtcatgattaaacgagtttttttttttgagacagggtctcactctgttgcccagactggaatgcagtggcatgataataactgtctgcagcctcccaactcctgtgctcaagtgatcctcccacctctgcctcctgagtagctagggctacatgtgcctgccacccaccatgcctggctaattttgtatatgttttgtagagatggggtctgcctacgttgcccaggctggtctcgaactcctgagctgaagcaatcctcccaccttgacctcccaaagtgctgggattacaggtgtgagccactgcacccagccaattttttttttttttttttttttgcgacgtcgttttgctcttgttgcccaggctggagtgcaatggcgcaatctcagctcaccgcaacttccgcctcccgagttcaagcgattctcctgcctcagcctcccgagtagctgggattacatgaatgtgccatcacatgcggctaattttgtagttttagtagagacggggtttctccatgttggtcaggctggtctcgaactcccgacctcaggtgatccgcccgcctcagcctcccaaagtgctgggattataggtgtgagccaccacgcctggcctcgagttaatattttttaaagcacttagaatacacctgacataaagtagtaacaatgtgtatctttgttaaaatgagagagaaatccccaaaatggcaaagataggaaaaacaaccatgcttttcaagtactgacttgcattttcagaaggttcaaattggcactagacttaggtaattgaattaatcagcatgactgataggataactatagtctgataaagaaaacaccatgaagggcagggtgcggtggctcacgcctgtaatcccagcactttgggaggccgaggtgggcggatcacctgaggtcgggagttcgagaccagcctgaccaacatggagaaaccccatctctactaaaaatacaaaattagccaggcgtggtggcgcatgcctgtaattccagctacttggaaggctgaggaggagaattgcttgaacctgggaggaggttggggtgagccgagatcgagccattgcactccagcaaggctctgtctcaaaaaaaaaaacaaaaactatgaagtaaattatggttgaaacatgtttagttcttaactgcagtatcttgcatttaaggtgtatgttcataacaagttatatttctattgtcataaagaacgttctattaaatgcttactggctcagaatcctattactttttgccagttagattatggccgtttctcttttagtctaaaataaactcagctgaaaagtaacaataaacactttatgtatacagattaacaacaaaaaatagaaggtaacctgcttggtgttagatattgtaataagccaaacaagtaacttttgtgtaaacactgaagtaagtgctttgaagaattcataaaagtttatgactctaattcatgtgagagataaaatgcatatacatcagaagattacacaatgaaagtatatggctaacgactaatgaatgatatagtaagtgttaaaagagataagatggggcagaggtcactactgattgtaaaaagtttcatgaatgaagcgagacttttatctgggtctaggaaaatgaagtcgttacaatcattacatcttagtacaagcaaggaatcaaatagtatgtctctcatgtgaacattttaagtaaataactggagaaagtacttcaacaaaataagggagcaaaataatgttggctcaaaatgaggtcgaaaagttgcagggctcggatcgtgttgctaaaggcataaatttgggagtcctcaagctgtagctaatagttaacgtccagagaaggtagtgtatattccatagcctcatgcaaaggaattccaactacgaagacgaaccagttaaggagaccgaaaagggggggcctgtatggaaaggcatagcaacgaatgtaaaatttccccaataatactctaaaactgccccacagcttttttaattttgaaaattcaaaaccattcaattcagctcgcagatttttgtgagaaataaggagatacttgcagctcagaaaaaattattaacaactatctagaaagttactgctttatcccccactgtaaactatactaccacgacccgggatccttgttcgactcctagccaaggggttcccactgcgtttctgttgggttatcccaaacctgtgataggatagtagcgccctccctgcctccggtcgaataaacactacaacgtctgacactcggtgctgaaaggaaatcgggcgcaataactgtcaccggcgccgagatgcggttccggcgcttagggcgccgctaaactcagagcccgggagtcatggctgcgggcggtgccgccccaggtaaatcagtccaggagcagggcccgggcctggcgtacactctcggaaaaatgggggccagagcaaacaagaagagcgaaagcaagagggctaggcagccagaggcggcagmaagactcaagacgccaacggcgcsgtcttcctggggccccagggcctgcgccatccctgggctgccggggcaccgcctctccacgcccctcgtccggcggcggctgcgactgcttccgaggtcatgttcccaggacgggcgcgtcttcagggtggaagcctggcgcacgtccggaggtgccgaggacccaaccagcccaaactctgggggaaatgactcccctctgccctcgccccgcgctctgctaccatttccttacgtctctgcttcgctcagcgatgcaaaacgcgcgaggcgcacggcagagggccgaagccgcggtactctccgggccaggcccgcccctcggccgcgccgcgcagcacgggattccccggccgctgtccagcgctggccgcctgagccaaggctgccgcggagccagtacagtcggggccgctggctggaagggcgagcttcctaaggcggggggaagcccggcgccggggccgggtaggaaaggcgggggaggggctccggccgtctggaaggaatccacgcggcttgaggctgtgggggaagtagggtggcgagcggtccttctgcgcgcggggggcggggggggtggggtggtccattagggtcccctggcgagggggcggctttctagtgtgtgagggcgacgccctagaagctccccttcaaagttggccccacgcgctgaatgtggaaagttgactgggacccagtagtttcccatcccaaacctgctttccgagaagggcttcaaacccaaaatgtgaatcccgcctcccctctcagccagaactgtggactcgtcccggggaggggcggtgggtggggcggggctggcgggaaatttcggttttggcgcgctccctgcggcgacgctcatcgtgcgctctcctsttcccccsgtggtctcctcgctcgccttctggctctgccatgccctgctctgaagagacacccgccatttcacccagtaagcgggcccggcctgcggaggtgggcggcatgcagctccgctttgcccggctctccgagcacgccacggcccccacccggggctccgcgcgcgccgcgggctacgacctgtacaggtgagcggggacctgccggcgaggaggctgggaagggccggccgtccgctgccacagctagaaacagtcaccgragagatcacaggaacacactagctataaataggatttctgcctttttcgtgtttaaaattttagctttcatctttggcataaattaaatagagatttgggcaaagactgcagaataagtaaaatagctatacggtgtctagcaaggcgttactttgcaacgtttattgtgcccttcctaaatagaagatagagaggaaggcccatggtggctttcgagtggcccgagggtgatgctgtgctcaatagaaaaaccaaggtgagagcctagatgtgagcgtgaaaatacctaagaaggatgaacgaagatgcatctgccttaaaaagttattttctatacattcatccggcccagggcggaatttgagaaggcatctgaaaacgaaaggcagagctgcctgtaatctaccacactttcatctctacagcacgttttacctgtactaaaaactttccgtatgctgttgtatttagtcctcacaacaatccttaactagataagtgttactttttacacaggcaggagtttgtgaagagctgaattgatttccccagaggcttgaagatgatataattttttatcccgaattttgggctttttttttttcatctgactactgtgcccagttcttagaaccattaaggtaggagaaaagtaatgctgagagggaaggagattttatactaaatcccaagcattgggatttattttaaagtatctcagataattcaaacatgagaactattagtctaagcacaggagaagagaaagtagtgcctgatgatagcaacagaaaaaaaaggaaaaggaaagtaggtatggacaattgtagctggaaaaactacagtctcttaattttgatgaataaaagtagagtgatatagtttgactagacctttccaaagtatattttggagcactttcttgagtcctaggggagtccttgatttaagataccttaagtagactcctaataaacacaggtgactttctgtatactgaaattgacatggaaataatggatcagcaataaattagggcttaactgtttaaagagggatttcagtgaaagaaggggtagtactgctttaccagagttaattaaggtctccaaagtaaacttccggttctgctcattgtaaaatctcttaaatttctacccaggagagggccacagtaatatcaagagtagcagcatttgctatgtggactttagaggaattctgttcctaagcaaggtccatctccaggggccgttcacrgtgatcagctgtctccctcagccaggaaattcatagcctaagcttggtaaactaccaagccctgcctgacagatacaacacagttctttatctcttattttgtccacccgtttttctcctttccttctgcatattttccctaatcacacagatcattgtgagaataaaatgggttaatatatgtaaaccaattagaactgttcctggcacacagtaaaggcttaatcaatgatagctagtattattagtagtatttggccttttttctttgttctttcttcatttttttccttttcaaactatggttgtaaagcatccaccttttgaaagtttgcctttctgccctttcacgctgataagtacctcagtttccaataaacttttgttcaggggcaaacatttacaatgttgacatctcttcacaccaccaaaaatattcrtggagaattattttatctaaagctgtctttttaataataaaatagccacctctaccttcttcataaayttttaagatgaattggtaattcatcatagcaaggttgattttagaaactaaagttgcattaattcattaaatacactgaaastaattttgtatgcttggtcacaaagaaaatataaaaacaattttataaatagatttgcagttattttctttcaatattttcttagtgcctatgattacacaataccacctatggagaargctgttgtgaaaacggacattcagatagcgctcccttctgggtgttatggaagagtgggtaagtcatttaagaaacaggtaactatttgtcaagttctcctttgtgatagattcttcatgtttcatttggggtaataagcaggcaatattgcttgggctgtgtcctaaaagaagcaccatttgtgatagcaaatgcactctttgaaaggctttatttacatctctgctttgcctctttttgacccttttatttttctccttcctcactggagcttttaggctcacactggcctagaaggctgttctcagaacatggcattttatattatgagagtaaaacttctgacctgttggtcccagaatgtgtaagcctacttaaccttttcttgtttggccatggggttagggtaagggatactcttcagtgttgtagaggcactgggaggagctaggacaaaatggagtacacgtcaacaggtttgatttttctggagcggatcagttgttaccagacagttctttgcaagagcgtaagttctttttgactaacttcagagtaaacataaaggaggcaatggagctgtgacgccctcctccagggaaaggagctagactggcactatattattagccatgagtgaggaaactgccagtacttcagcccttaaaagataacaagatgggctctcatctcatctcttgagcatcattgactccattttttagaattttttcaggggaaggggcaggagatggagtgaaataaaggttagtacagaaagaggcagcattattgacaaagtgcctgatttaaattattctaaaataaaatgctggaagttaggataattaattataggcctgatgcttgagtctgcaataataaggtgtaaccttagctttttatttttttcattttttaggattaaaaagtatactagcattgaatcattgagacttagtttttggcatttttacttaactgatattagcccatttatcttactctggttcatgtgtttcctacaggcatgtcttttggcatctgaatcatgaatagtggggtcccaagttgtaggctatggtctgctactatttggttaggtttgtttccctctcccttcctcttcctttcccttcccatctgcattgtacatgttgtggtgtcccatcttaaaaccaaagtcttcttcctcagtagtgtgttcctgctggccatacttctctttcttcccctttgaggcttaacttcttgaaagagcagcctacagttgttcccgcttgctcacctttcagctcattctagcagtccttctcccctgtctgcagcaccacaaattctgactgaagtcacatgggagtggtttaagttagttttgaattaaaaccttgtggaatttttmtaaactagtctttccaactttggtaatgcagtatgatgaatatatattctttaattcaaaaccatgtgctaaagttaagatgaagatatagatattataggtgaagagaatgacatgcttaaattgcatcagttatctctgatatagcccttcccccttaaaataaccaatgtctccttttttgttttttagctccacggtcaggcttggctgcaaaacactttattgatgtaggaggtaatatatttccttttttattctgtaaatgtttgcaagtatttactttgtctttaaaaggtaatattcaaatgacagattttatttttaagaaaagaaaatgattagaggaaagcttgttataataggaggaaaagctttgtggttattttaagtaattatattttgtttaactactaacttaatttttaaaataatgattacctaattaataatgacagatttaatgatataataattaagtaattatttaagcaacaaaagttctagaaaacacaggtctatcttgtaagaattttcttcataagagagctatctgtctttagcaaaatttaagaagaaaatctttccctgaagtcaggagagaaaacacttttctctaaatttgttaagacagtcctctgtgttacctgtttcccttataataaagcctttctcatgtttgtctcaaagttaaccctacctcatgtggtacctttcatgaagaaccctcagtgtcctctgctaactactcttgatacagagctactcctcttattgtaaggaaatttctactttcctgatgtggtttccttgtttcaggtccgctccaactgggattcagaccccacttatgtggtccttacatactgaccctttatcccatcagtagtgaatctttcacttaacaagataccttggcccccacataagtaggtgtgctagatctcctcctccacccgtttttacagagctgctytatggaggcttgttaacagatcaggaaaactggyttagaaatgagcccacatggatatgtggtaaaaactggagtctctgtgtgattccagcctccttgttctttccactgcaattaattgtggagattaccctgctgcatccccctcaccaactaaacacgtccagaattagctcacttttatgtgccactgcaagggctaactaagcacttaatgaaacctggctatcctagacctgccccttagtctaacatttggtgggtgtggtgtctctccatagtgtcaccaggtggtgctgtgggacaagacaggaccccaaaagtacaccctttagggactaaaggggagctgagttttacatagcagggtggacattgacagcccactcttgggttgaggattccttgggctctgtaagttatgcccgatgttcaaaaatgcttttacaaggtcaactgtggtcattttgggacagtaacttaaggatataaataattgtatatattttcaatgaagtttcaaatgattgttcaaggaacgggagctttggaataacaactggatgtaggtcccagctctgtcattaactagttattacttaacctttctgagcctgtttcctcattttacaatggaaattagtgtgcctgcctctagaggtaggaggattaaatgataatgtgtatgaaatacctaatatagtacttggcacatattagattctgtgagatataatttctgtccttagggacttcacagattgtttttatgtggaaactttttcttttattcgactttgttactaatttttgctctgtttaaaacaactttctggaaaaaaattcatgtaaaagaatggaaagttagtttgcctagtggttggtatggtgttattcataaaatcacattgtggtgtgttcttggatgcagagaatcttaacaatctcccttaggcacaagtttatcatagttggcaacagtttttatttctgaagagagatgttgttagaaatcccaggctctaaataagggtcaaagggaaaagttgagcattcaggattctgttcagaattcacatctggtaggtgtggatagtttttcactaaaaaaggtttccaacaaatgacatgccaaactcttgacacagtaaaacttttgcctgaagtcagttaatcactctgccagttccaatgcatgatttttccagtgataacttcaagttactttctgctttctctgaggagaaatatccctgatacttatatcctgtaggcagagaaggcttttcttggaggtcgaatggcaattgggtggtaaatgaatttggaactactgaaatttttataccgtcaacattcatgcaaaaaaaaaaactattgagggcctttttttctgccatacatttgaattgacttcaaacttcttaatttcttttagtcacttaaaggtttttcacattttcgtggcccaagcataaagatcacctatctgcaggattcaagacacccaatcatttgagtagttctgataggactgctttacagatacgttagcagaggcctttcaaaaagggagtgtttttgtatgttagaagatactataaagccaacaagcaaatatttgcaacttatatgaaaaagaacaaatgagaaaaaaacatacacaaaatatagacaaggacatgcaaatgtccaacaaatgggaggaaaaaaatccagcctcactagtcatcagggaatgaaaagtaaggcaatgagatagccattttgtactcatcatattggccagaatgtaagagattgttgccatcaaatattggcaaggattttggaaatgggcattctcaaatattgctgatggaagtttgagtggctacaccttttttgcaacctatttgatgaaaataaaaagcattcatatacaaggatatacttaaagggctgcttcatttattatagcaaaatgtaaaagcagcctgtgtctgatattatgcaagagaatagttacatagaaacaatggtacaggttgggcgttgtggctcatgcctgtaatcccagcactttgggaggctgagacaggcagattgcttgagcccaggagtttgaggcttatttgagcaacatagggatactttctctctacaagaaatacaaaaattagccaggtgtggtggtgcctttgtacctggaggctgaggtgggagaatcacttgaggttgaggctatagtgagttgtgatcataccactatactcctgcctgggctataagagtgagaccctgccaaaaaaagaaagagaaggagagagagaacccatatttccatatcttgtatctaaaaagaatggctaacatttacatatattaatctcaaaggataaaaagaaaaaaataaagtagtatgtaagatatatttctgtaacattagctatctcagggagggtaagagaatattataagcttttactttatatgtatttgtattgttttagttatttaaaaatttttgaataaagtagaaacaatagttcagaagtcagtccatgtctttctctaactcattcaagatagatgaattattagcttgtacctcaaaatctcccagcatggaagttctctagcctactgtggccattttttctagcatggaacaacatgctatgttgagggatttcttcattaaatctaatttaaattgtccctgcagtcaaaattttttccatatagataatatggaaaacagctggtttcatctttatatcaaattttttcataaatattaaggtgtaaattaatggtcaactgacggtggagaaataaagcagggtttggtattggaattggtcaagttcaataatggattgtttccttcaggcccgacaggagatgaactgcctttgctgcttttctgcccagttttatactcactcttctcgtaaaagtgttgcatcaggaaccttttaagaagtgcttaaattcagattcacttgtccctagtaattcattcataaagcacaggggttcatttaaacgtatgttgtaatccattcggaaaatctaaaatgttgtttttgctgaatatttttccccgtggtggacctaagggtttgcttttttccccccattatatgagaaaattgaaaggatatgcttaggaattacccttgttcttaaaaaatggggggtgggtatgctttggggtttttttgtctgttttcycagctttcaaataatgaggagtatgggcaaatagcattactgcccattgagctgaacacaggattatttttatttccatattttttccttcatcagggcttttgtttggggtagagtattaataacaagtaagatgtgacatggagctgtcttcagttagattcacgtgagtcttatccagcctttcacaaactgaggagaaagaattaacgtgtatagcaggaaattgggggtgggaggaggaaggggagtgactgctaataaggtaggggatttttggagggagggtaatgtaaatgtgctataattgactgtgacgatagttggccaactctgatacactatgaactgtggaattgtaacacttcaaatggataaattgtatgctttgtgaattatttatcaatataaaaaaatgaaaaggcccggtgcacctgtattatctgtgcttgtgcttatggaaatattttaaattattggctcaaagataaatgctagcaagtctggtaagtataactctctgggctatgtcagggacctggctcaagyctcccctgcaaagatcttctccccctgtgttcataatcttaaacaagtattaattacacaaaaaaagttgtactcatgaagcctatgtgctacagtcttctgagaaaccatgctctaagaaaggatggtggttcagattaaaaggagaggaagattatgaactgaaaaatacagcttcatttttagtgtaaaaatggaatattctaatatttgcaagactgctgcttaacaatgtcagcgttgatttactccactgcagagctttaggctttttgacatttttatttatgactcaatygtatttcaatctgggtattagcgggaagctgataccaggaaaaacctttaaaacccaaatcgtaattttctcctagtctttttggcaagtgtgccgtgggtagacagtaggttggagatggccattgctactgccagcttaaaataggaantggtcgccatttgataaagagtgacaggttggaaaattaggacctgttttctaaatttttatttgtattttagtaatgtcatttcttggttttgaggctttacatagtaccagggcaagattcacttattcaattgtaagaatacaaatctcagagctacatgataatgattttgagataatcttacacctctagtattccaatagcaaaaattgagataatattacttttcttttctctagctggtgtcatagatgaagattatagaggaaatgttggtgttgtactgtttaattttggcaaagaaaagtttgaaggtatgttaaatatatacattcacataattttagtgaattttcagagtcatgtatgtgtaaattaatattgactcctttaattctcattgaataagacaggatatggcgaatgtgtcagtaacgtcagtaataaactattctttctttgaagtcaaaaaaggtgatcgaattgcacagctcatttgcgaacggattttttatccagaaatagaagaagttcaagtaagtattacaaaggaagatacagaataagtaatataacatcttaagtgaagaaatatatataatcttgagaatttaatatgctgtttgtaactaaatagtatatatgactaaacttattttaagcaaatttaaaatactagttttagaatttctttaaatgtttttcatgtagctattatgtagtattactttggataataagttatttaaacatactgtgaacttctaatattttattagaattttttaaagttatccagtattctaatttatggagctttttagaatttaattttctttctgtaatctcccttttgaaaagatgatatagcaagagtagaattctggctgtatttttcttaggagctggagaggaaaactgaaagaggctcttaaaaaaaactgtgaagcttactacctttctatctttcaggccttggatgacaccgaaaggggttcaggaggttttggttccmctggaaagaattaaaatttatgccaagaacagaaaacaagaagtcatacctttttcttaaaaaaaaaaaaaaagtttttgcttcaagtgttttggtgttttgcacttctgtaaacttactagctttaccttctaaaagtactgcattttttacttttttttatgatcaaggaaaagatcattaaaaaaaaacacaaagaagtttttctttgtgtttggatcaaaaagaaactttgtttttccgcaattgaaggttgtatgtaaatctgctttgtggtgacctgatgtaaacagtgtcttcttaaaatcaaatgtaaatcaattacagattaaaaaaaaaagcctgtatttaactcatatgatctcccttcagcaacttattttgctttaattgctttaaatcttaagcaatattttttattcagtaaacaaattctttcacaaggtacaaaatcttgcataagctgaactaaaataaaaatgaaaaggagagattaaaggtattccttgttcttcccttctcttcactagtctaaaaacttctttttaatcttaagattctttgtgatgagggtgagaaaaagaatcctcagtttatttttccactattaatctttcttttgataaatcctctattgactgggtagaggtatgtttgtgaaagacatgtaacttggggatttgttactttaggtttgttcccttgaatttcatctcatcaggcaaattgtactagttgtagttacgagttttccctcagtgaagtagcaataggctgtaatcaagaaaatatgccatttatagagataagataaatgaaataatacttcagccaccaggtttttctgtctcacatacataagcagcatttcattgcagatatgggactgattctgtggcttaccttgattaacatcttttggaagttttgctagtgtgctttcctttctttactatgtttctcagattcctttgtatcagggttttgggtgtcacttaggttttgtccatcagattctgtgagacaccaggcatcgttttgaggatgtgggttatacacatggagtgcttctggaactatcagcccacttgaccacccagtttgtggaagcacaggcaagagtgttcttttctggtgattctccaggccatttaataccctgcaatgtaattgtccctctgtggctcacatttcattagtgagccatgaaatcaactcagtgggacatagccagcatttttgcataccaggttgggctataaaatatttctgttgtcaataaattttaaatgttttcctgctaaactaaccagaatgaattctgttttgtgcaactaaactgtgatcaataccgagtaacagttgagtaagaacaaacagtattacatggctaccgagaaatatggtcttagtttacactgttaatgtcagttacctcttacagaaagtctgctgtaacaggcacttcataaacacctggttttttactcatactgtgagagagtaggtaaaacccattgtacagaatgcagaaatgggctcagagaggtttagtaacctgtataacatttcagctatgatgatcactgtctttgttttgtgctgctatacctgagatggtaatttacagagaatggaaatttattctcagttttggaggctgggaagtccaagatggtgcctcattgctatgtcctccagagaggaggaatgtcatatcctcacatggcagaagactagaaaagagccactcccacaagcccattttataagggcactataatgcattcatgagggctcagtccttaggacttaaacacttcccgttaggcgctgcctcccaatactgttgcattcgagactaagttcccagcatgaattttgggggacacattgagaccacaccagtgacttaaaatgcaggcccttatgccttcaagtccatatgtgcagtatcttcagcctcttccaagtggtagaggtagagaatgtagagaagagagagtttaatttcttcatacccggaatgtttccatctgtgtaccatgcttaaaggaacatgctcagatatgaagctgctcgggaaattagagatttggagtatgtccatggggttaggtgaaagacccaggatgttttgtttagagaagaaatgtatcgggaatgggaggaatatgggggaagaagtggctattgaaagtccctgggatatgatagatgtccttagattaaacacttagatggggctgggcacggtggctcacgcctgtaatcccagcacttttgggaggccaaggtgggtggatcacttgaggtcaggagtttgagaccagcctggccaacatggtgaaaccccatctctactaaaaatacaaaaattagctggggatagtggcacgcgcctgtaaccccagctacttgggaggccaaggcaggagaattgcttgaacccagaaggcagggttgcagtgagccgagatcacaccactacactccaggctaggcgacaaagcaagactctgtctccaaaaaggactcagatggaattagccttgtcacatatgacttgagggaccagaaataggattagaggacttaatctataggaagatggtggcataggggcggactcatagaacttccctgaaatagcaaaattaataaaatgaaataaaagcaaaatatatgccatataaaagaaaataacgtaatgggattattggagactcatttttctgtgttatttctataaagtttgattatagtatttttactgggtgaaatgtaaaatttagaaaagcatacaaagcaagtttacagtatagtgaataactacaaaataagaacatctgaataaccattaccaaagtgaccaagcagaatattgccaggagtacattccttctcaatcatacgccacctgtaggggtatccattcttttgacacttaatttccttttccttaaagtttgcaacctaatcaagcctaagtttcgctttgcctggttttgaactttatcaatgtactcattaattcttgggtcttgcttcctttccttaacattgagattttatccatgtttcatatagctgtagttcatttattttattaccttacagtgttctgttgtattaatgcaccacaaccttgccaaccgaacttggtcatgctgtattattgttattgctaaacttggttttctaatattttgtttagggtcttcttttttatcaatgttcacaggagagattggcctataatttttcccttgtcacattgtatttgtcagcttttggtaccaaaattatgctactttcataatgtgaactgaggaatattctttctctctcttcgaatcccctgtgttcctcccctctcctcccctcccctcccatcctttcttttctcctttctccttccctcccctcccctctcctacctccagcacctctacagtttctggcttttcttgtaacagtttaaagagtcagttgtcaatcaagctctagacaggttatgtgccttttttcctctggttggttttaagattatgtgtttgtatatgtctttggtttagtgtagttgcacaactagggaatagattactgtttatcttttggggattcactgagtctcttaatctgtgtattgatatctttcatcagttctggaaaatctcagcatctctatctctgcatgttttattataatattctgaaatgtctgctcaaattacagttatagttgcttattctcaattaagttaaaaccacttctttttatagcagttttaggttcacagcaaaattgaaagaaagtgcaaagatatcccatatacaccctcctcacacacgtgcacagccccctccattatcagcatcccccaccagggtggtatatttgttacaattgatgaacgtacgttgacgtatcatttttacccaaagtctgtagttacatttgggttcacttttgctgttgtacgttctatgggtttggacacatttataatgacatgtgttcatctttattgtatcacacagcacattttcactgccctagaaatcctctgtgcttcatctattctgctcttctgacccatgcctgcctacccctcgcttagcacacttaagcaaccactggtctttgtactgtcttcatagttttgccttttccagagtcttacatagttggaatcataggatacagctttttcagattggcttctttcattaatgtgcatttccatttctcctgttattttctaggagttttacagtttcacattttacatttagttctgatccattttgaatttttttttatgatcttttaatttttgaattgtaagggtttttattctggattaaagtccaggatcaggtatatgatttgcaaatattttcatttattatttgagtgtcctttcactttcatgatggtgtcaagaaacacaaatttttaaaattctgattaggtccaagttatctttttaatgttgtttgtgcttctgatgtcatatattacataatkcaaggtcataaagattttacacctaattttcttccaagagttttatagttttagcttttacatttggggctttgatccattttgacttgacttgggtatgtggtgtgagatagaggtctaacttcattctttggcatgtggatattcagttattccagcatttgttgaaaagactatttccccatctaattgttttggcatccttgttgaaaatcaattgaccataaatataaggaccaatttctgaattctcaagtctgttacattgatctttatttgttagtctttatgccagtatcacactgccttgagtactatagcttctatgaagttttgaaattaggcatcctctctctctctctctctttttttttttttttttttttttttttgagatgtagtttcgctcttgttgcccaggctggagtgtaatggcatgatctcagctcactgcaacctccacctccctggttcaagcgattctcctgcctcagcctcccgagtagctgggattgtcaccacgcccgactaattgtttgcatttttagtagagacgggtcttcaccatgatggccaggctggtcttgaactcctgacctcaggtgatccacccgcctcggcctcccagagtgctgggattacaggcatgagccactgtgcctggcctaggcatcctctctgtgtctctctgtatatgtgtccatatttccctcttcctcaatgtagtatgacctcatcttgattacatctgccaagcccatatttccaataagatcacatttacaagtactggaagttaggacttcaacatatctttttaggggacacatttctacccactacagatataattaatagtatttttcctctcttgtgatgtctttgtttttggcattaggacctcatagaatgagatggaacgttttccctcttatgtttttaagtttgtgaagattgtttgaattctttaaaggtttgaaatttaccagtgaaaccatctgcatctgcacatttctttgtagaaagcttcgattactaattaagtgtatttaattgttattggtctgtccagattttctatttcttcttgagtttgttttggtagtttattagggctctctcagagggacagaactaataggatggatatatatatatatatatataggtgagtttattaaatagtaacttacacgatcacaaggttccacaataggttgtctgcaagctgaggagcaaggagagccaatccgggttctagggcaagaagcatcctacatggaataaagatgtaggtgcggaggctaggcccatctttcctttttcacatttttctgcctgctttatatttgctggaagctgactagattgtgcccaccggattaagggtggatttgccttccccagcccactgactcaaatgttaatctcttttggcaacacccacacagacacacccaggattaatactttgtatccctcaatccaatcaagttgacactcagtattaaccatcacaggtagtttgtgtctttttagaaatttctccatttcatctaggttatctaatttcttggcatacgcttgttgatagtgttcttataatcctttttatttatttcctttttttttttttttttttttgagacagagtctcgctctgttgccaggctggagtgcagtggcgtaatctcagttcactgcaatctctgcctcctgggttcaagcgattcccctgcctcagcctcctgaatagttgggaccacaggcatgtgccaccatgcccggctaattttttttttttcttgtattttagtagagatgcggtttcaccatattggccagcatggtctcgatcttctgacctcaggtgatccacctgccttggcctccctaagtgctggggttacaagcgtgagctactccaccctgccaatcctttttatttctacaaggtcaatagcaatgtacgtctttcattcctgattttagtaatctgagtcttctctcttttattcttggttagtcaagataaagattcattacttttattgatattttcaagaatcaaaagtggttttgatttttctgctttttatattctctacttcatttattgccactctgatttatattattttctttctcattgctttagttttagtttgcttttcattttctagtttcttaaggtagaggattagattattaaattgagatttttcttttctttttaaatatgggcctttacagttataagtaagaagtaaaaaagaaaataaactggttttctaggaggtggaagccttatgctaatgaggcttggttcctgagctcattgagctttgcattcccatttgctagattcctgctgggggcaaagggagaccagggaagtgtctttttctaaaggcaagttcttctgcactagaaaggaaaccaaagttatttacttatggccaaggagaagaccttatgattttcagattaactaataattgaatagtagtaaccattttgccagtcttagtaatttcccagcagaaatcaggcagttgtcttctttcttgacagtctgcctcactcactaatgatgcccactgttcattcctgtccttggtgctatatgtacatcagaagagaaataacaggaagtcttctaaagatgaatctgatgctccatcaattaattgacttcagtggggctatttgcagaggaagcaacatagtattatttaaacagttggcttggctgggcaaggaggccagggcctgagatctgagttt

SEQ ID NO: 96104 - DNA, 20502 bp, Homo sapiens
  misc_feature (1)...(20502): n = A,T,C or G
aagcagtaggcaggcacatctttgccaaggtgaggctctgccctgttttccctcctttggccgtgagtagcaaaggcctgagccacttggtttctcccttctccaggtgcagcagcgaaggcaggaactggaacaggtgctgggaattcgcctgacctaactgctcagggrtctttcttcccagccctggagcctggagggagaccaccctctgggtccttgctggggccgcagacacgtaggctggggtgaggagtgtctgctgtcaccctctactctccagctttagtyttataaatgtagtgataggattccttgttgcttggtccccaaagccttatactttttgcattggctttaattgggttcagcagatgcctcctctgcccccctgcaggcaggcccaagtaggactgctggaggctgtgctttgacattgtaagacatttccgaaccaaaggctgctgggtttgcatgtttacagactccccctggggcgagggtcagagctggctctggggagctgggctaggaagaggaggtgcagcccagactcttcctagcctttctaaaccaaagttctttgccattcctacaagcccagccttgctgctggttttttcctttcctttgggtatttgcactattttgggagcaagttttctatgtgggagccactttttttgtacaggggtaagttgggggttttcagggagcctgttaggtgcctccttcttttctttcctcaatctatgcaagcggctctggccgccatcatctcctgggatgccagagggctgcctctccagcggcttgggccggggaggggacactccagttctctagcatggcctgaggtatggggtatgtgcatgtggaggccagggtaaggtgaatggggaggctgggaggactggtgttgccctttggagcttggtgaggagggtgggcctagggcttggcgagtgccacwtctggcaggtttggaaatttccaaataaatccttttgtctattggtggtgcctggacctggtccttgaacagcacagccctcattaacagactggagtcctagaggacttggcccacagagctttattggagagatacacacaaaggctgtccactcacttccataatttcttgatggacatgtttttctcactgtccttctgcatgacctaggggtgggagagagaatgaacattaagttacgaacacacacatgccctagcccactgccccagagccaccactggcaaaggcacaaagatggaggcctataccttggctactgccatctcaaagtcctcctgagtgacatggactcgccgttctcgcagggcatacatgccagcttctgtgcacacgccctgaacaggaaaaggaaattgaggccccactgctgtgcccctcatctgtggcccttgagcccagagcttcctgcctctgccctgttttcagtgggtactccaattaccttcacttcagcccctgatgctcctggcatgagctcagcaatttttctcaggttgatcccccgggtcaggttcatcttccgagaatgaatcttcaaaatgtccagccgggcctggagatggcaaggaaaagcctgagccccacaccccacccccacagccagagccactttgcacagtgtccatcacaaacctcctcattggggggtgggaattcaatttttctgtcaatgcgccctgggcgaagcagtgccgagtccaggatatcaatcctattagtagccatgataacctgagcagagaaagcaagtggggatcagctaaacctcttcctcagcctgcgtggcacccaggccttccctgggcccatcccaaggatgctaccaccttaccttgatgttcttggtggcctcaaagccgtcragctggttgagcaactccagcatcgtgcgctgcacttcactgtyccctccagaacccccctccagccgcgaggagccgatggagtcgatttcgwccatgaagatgatagatggagcatgttcccgtgccatgacaaacagctccctcaccattcttgcccctgtgtggaggccgagctggtgttagggagcttattagcttattagctctctaaccccctacccctacctcttgcttctcacattgctagccatggttaccttcccctatgaatttctgtaccarttcagagccagagacacgaataaaggtacagtccgtatgatgagccacagcccgggccaacagtgtcttcccagtgcctggaggtccatacagcagcactccctacaggggaacagcaggactcagggcagaaagctacacccctcatttcattcagtgaacatttaccgagtgctgggtcccttgctagatgttagggatacaaaaaaaaaaaaggaacatcaaggtcccttctatccaaaccacctcaccgccctaggaacacttccccagccactcttttcagggggagggccagcccaagcaagatgcagcctatcccggtgcctccccaacccctgcagtagggctggctggggcaggaggagtaagtacagcttggccctctcagagaagccctgctcctcaccttgggctgagcaatgcccagtgcttcgaagagctcaggatgcttaacaggcagctcgatcacttctttgatctccttgatctgtttgtccagtccaccaatcatctcataagttgaatctggtactttctccaccatcwtcagtgacactaatgggtctaccttgttgggcaggatcttgtgcagagtgtagctgtcattccttagagccacccggcaattgggtgtcacctgggtgaagggggcgagtttcagaagtggtacagtaagagctgaccccaccaccaccaccacctcacctgctacactcacatcattgatgtcaatgtttttgtccacgtctacaacaaatttaccttcaggatgtacctaaagaaacaagggctcatgaccttccttgacagccaccaaatcactaatcctacccaggaagacctatgagaatcccacaataccttgacagaacacagaaccctgtctcccgaggctacacacaaaggggtgggaatgcagtggagaccgagctggtccctggggtcatgcygcttttaccttgaccaacactttcttcttatccatggcccggactacttcccccacataggagccctgctcctgcagcagctgtagctcctcccgcaataggcgaactagatggcaaacagacacagtggtcacctagctactcctttggagtctccaggacccaattctacgtgcatgagctaagcatcactcttattaaaggaaggccaaaggtcaaaattcatgtatttaaggaggctacaatagggctcaggaaaaagagatgcatgtgaaactactagatgatgacagggagaaaacagtaagcactgctgtgaagacacagtgcagggagataaggacagacctcagacaaactgcccacatgcggcttcccatctttctccactcacctttagcatttagttcgttcctctgtgcctgcagcctccggaggttttggctcttatcattcacaatcagctgtggcrgacaagagacaaattccattattcaagggcaggagacaggaggaggtaggatcttggccaagacctcacaggtctgaatgagctgagggaagggcacagggcacctgcatgttgtttcagattctccagtatgatcctaatgaccctgccctgtccttcaagagtccctctggaccttacagcagccatcaaagaaggctgcttgtccaatactggtccaggagtaacagaatctaatggagaaaagttacagctggctcatgtaacaccaaatttcttgcaggaaggcaacaacacctggtggaaagattgttaggtgagaaacctgagttctagcccagccgctgtcaatcaaaagcaaagtaaaggtaagacaatctatttttaaaaatctagatctgttaccaaacggcacatgggtatagcatcagctaccctgcttcaagactactaaggtgaacgaataaaaacacatgaaaaagcattcaaaaatggtaaactaaacataatacctgcaaatgcacttggaattcagaattgtcttttgtggctttcccccatccaatttatattacagttgacacttgaacaacgcagggggttagggtgaaattgaaaatccatggacctgtccaaagttaaactactaacagcctaccgtaacagtataacgtaacactaacagactactgtttatgttgtctgtaaggcttactactggaagccataccttactgctggaagccttactggtaacacaaacatttgattaacaacataaacggtcctttttctatggtttagcgctttaggctagggctctgggttgcccaatttctttcattcagtctctatggaattagcattgtccagatccctcaatgatgcccttcctcacattctcacttcaccctcacccaacctcttggtgataaatttcaactcctgagcttatgtttcccttttataagaatccttttcattcgggcttcttccaaaagggttgacctttggctagaggtacctttactattaagatttgactcgaagatgtgtaacaaactgtgaacactaagaccctcaaagagatgggactggaggagaacaagagattgcttacttctgatacatacaccctactagctaagaaacaaacaagaaaggagaagcagcagcttcttccactgcactcccaaaggaattagatggatttgtggaagtccgtttccatcccccatcatcacccttcctagctccctctggagtccgtcctcacctggagttcttcaatcttggacagataatattggcggagtccgctgcctgccttcccctcctccagctccatctgaagacacagagtgagtcttaaacgacaggttaaacatccgagggggtaaagccacttgcagggcactttgaataaggcttgacaccaggtagctttgcgtagtagaaaaagtttggacttcggaggctcaggatctgggttctaatccctccctcccttggaaccctccattttcccaggactaaaataaaagaatgggaacgccgcctacctcatacgacttttaggaggaccgagaggcgatatgatatagacggggggcgctttgcactgcgtgaagtgctctacaagcccgaggtgtcagtactgacgaaggagccagcggaacggagccaaaggactggcgtcccgtctcctgcgacccgtgggccggccattcccgcgcccatcgcttccctcactcactccgcttctaccgcgtcttcctctcccagccttgccctgactcaccgagggcggcgctgacamagcagatccggtcgcaggcagcgtccagcatggactggtccaggcacctccgacccacccgacgctcctgccccggcccgctctccactcagatcacgctcgctccgcacccagccccgtaacctgccgggccgccactgcacccgccatacctgctctggtccgtcaagcgccatcttctctcttcagcagagaccgccggcatccgagccgtcttggcgcgcaagcgcggaagcggaggattgggacctgaagaccaggcagagaagaattccgggtcaatgggcggggtgtgcggygagrccacactaagggaaccatgatgggaggggcggctactcgagttcaggggctttggaaggggatgaggaaggagtagaactcctcctcagtgttgcctcattgaaactctgtttatagttcttgtgatatgccttcctagtctcaactttcaacttacaaaacccaaggacagagtattgagaacaatctagggccacactcaaaatggcggaaaacctcgagccagggacgcaggggacgcaagcggaagcggaagtagttagctgcatacttgtgcggttccaagtgtggagaaagcggctctgggtctaggtagtgtgcggagaggggcgcggggtggaattgctgcgggaagtgggaaactggaagtgggaaactggaagtggaatctggtgctccggwaagagacgttcccaacttctactttctccccagattgagggatactccccctttccaccatgggcaagaagggcaaagttggcaagagccgacgagacaagttttatcacttggcgaaggagacgggtgagtccggattcgctcagtctgcgagcgagcgagcgatctctgcccggttcgcctgctctttgcgaccattatgtacctctcctgcagaaggggtggtcggttgcgaggccggagaaatcctactagtgaagcagtttgcgcacttggttgttttgtccaggttaccgttcccgatctgctttcaagctgatccagctcaatcgccgctttcagttcctgcagaaagcccgagccttgctggacctgtgtgctgcgccaggrggatggttcgtaacactcgccacaggttgctcctggtggccgctttctgggttctgagctgggatggcttccagtttcactgcgggaggggaacccgaatcccggtcctcttgggggccgtttcctttcttgattgcagagaaagggcttggaatacgtgcctatgatatgctttggccagtacacgtaacaccagggatgagagatcagttgccaagagggggaaaaggatggctctaggtttttaaatttctgttccttttataggctgcaggtagctgccaagtttatgcctgtatccagccttattgtgggtgagtaacggacagctctccttggtgttttaaggggtgggtgtataaggtattttgtcctgtatttctctyctccctgcttgaagcaaccttttagaatactctgacctgatttcttccaggagtggacctggttccaatcaagcctctccccaatgtggtgactctccagsaggacatcacaacagaacgttgtaggcaggtaataggagtctctctcttccttcccyctttatacggaaacatctacatccctgaaatcctctaaaggcaagtttttcctttttaccgtgctttgagcacgttcttgcctgacatctgtacgacaagacctatggcattcgtagtgtccactccagrctttatttagagtcagggataaaggtgtttggaattgggagaagggcagagatctttagtgaagtcttctcctgtgaaytcagtgtcagactgtaatctccatgaaggtagagacatactgtttttgtttactattgtatctcctgtgcctggtactgcatttggcccatgatgggcactyagcaaatgactagatggacaaatggctgaaccagggccattccagtgtttctgtttccatagttccttttcttctctttaggccctgaggaaggagctgaagacctggaaggttgatgttgtgctcaatgatggggcccccaacgttggggctagctgggtccatgatgcttactcacaaggtacagggagtgtggtgcttggagatcaggtgatggtggaggtgggcgcatgccctcctgggctgcagagtgcstcaactaattgtctctatcctacagcccatttgacactgatggctctacgtttggcttgtgactttttggcccgtggtggcagcttcatcacaaaggttttccgttctcgtgactatcagcctctgctatggatctttcagcagctgttccgccgtgtccaggccaccaagccccaagcctctcgccatgaatctgcagagatctttgtagtctgccaaggtgggcatcatttcctttctcttgatccaggctcccaactcccaaagcacactttttaatatatcctgtcatttttaggattcctggcccctgacaaggttgacagtaaattctttgaccccaaatttgcctttaaggaggttgaagttcaggctaagaccgttactgaattggttactaagaagaagccaaaggtgtgttttggggaatggggtcactcttgggtcctggaactctagggaggttgggcctggtgggtcctacaggtaccttagaagggcctgaccaagcttctctcttttccttcctaaggctgaaggctatgctgagggtgacctcactctctatcaccgtacctcagtcactgayttcctccgagctgccaaccctgttgacttcctctccaaggccagcgaagtgagtctccagccttgagggacatgaggtagccccagaaacrtggcctgaggatctcccctgacacctttccatcctcccaaacagatcatggtagatgatgaagagttggcacagcatccagctaccactgaggacatacgggtgtgctgtcaggacatcagagtgttgggrcgcaaggagctcaggtatggagtggggtaggcacgggggccaggagccctggaggcagggaaaggccatgatgttggacctctgggaagaggatattgctgtgctaaaggtttgggatgggggcctgagcsttttgatttatgtagccgaagcccgaaaggtgggtagtgagcctaaaacagaagggggcggggacaaagagggagatggcaagatcagtaatagtatctctggggcaggtcgctactaaactggagaacaaaacttcggcgatatgtggccaagaagctgaaagaacaagcaaaggcactggacatcaggtgaggagagaacgcagcraggcaggtgtggacngggtgtccaggggaanagtctgggaaaataacccaactcttgggactgttttgccagcctcagctctggagaggaagatgaaggtgatgaggaggactcaacagctggaaccacaaagcagccctctaaggaggaggaggaagaggaggaggaggaacaactgaaccagaccttggcagaaatgaaggcccaggaggtggcggaattgaagaggtgaraggagctggggtagagcttggagttccccaacgcagggactgtgtgaagatgggagaagaaaatgcaaggcatggatagaaactttggagctgggccggttttactccctcaatccaccccctcaggaagaaaaagaagctgttgcgtgagcagagaaagcagcgggagcgtgtggagctgaagatggatctgcctggggtttccattgcagacgagggggagactggcatgttctccttgwgcaccatccggggtcaccaggtgaggcggcattgggggtgcaggtttagragacagaaggatctgtttgggtgtttggaggtggggggtgttgaatgtctttttaggttgccgaacgataggctgtggttgctgtcttcaccacagggtgccttggtgagtataaggccacaaagaaacataaaccaaaaaggatgagttaggtagatagatgagtgtgatagatttattttttttttttttgagacggagtcttgctctgttgcccaggctggagtgcagtggcacgatctcggcccactgcaagctccaccttccaggttcacaccattctcctgcctcagcctcccgagtagctgggacaacaggcgcctaccaccacgcctggctaattttttgtatttttagtagagacggggtttcaccgtgttagccaggatggtctcgacctcctgacctcgtgatctgcccacctcggcctcccaaagtgctgggattacaggcgtgagccaccgcgcccggctgatagatttattcttgaagaactagaacatcagaaaagaacttaggttatagtagatgctgccaggttacttgagtttcaagcacagatgaatagaggatctccctcagaggggagcagcattctttagttcattgagaccaagtgagcactcgcattagggtacttccactgaatactgaagaacatgtttttcctgacaaaatcagggtcacaaacaaaatgaacttttgtggcttatgtgtgggagtgtcataatcaggtcatctttgttgtacaggagggcagtagagcatggtggccctagagcagacacaggctcaggtttccttcccagctctaccacctggagctttgtgaagtgactgagctgactaccacttatccttgctgcctcagtttcctcatctgtaaaacaataatagaacctacctactagagtttttggtgaggaataaaaaaagataggtgtaatccctcatatgtgataaacactcaagaaatagtagttggagtttttcctttgagacaagatcttgttttgtcacccaggctggagttcagtggtgccatcatgactcactgcagcctcaaactcctggcatcaagcaatcctcctgcctcagcctcccaaaatgctgagattacaggtgtgagccaccatacccagcctagtatctttaccatgaggaaaataaaaggttctgacaattggtttaagtggaacagttttgttggatgtatgttggctgggccccttttattcagtggaaacaaactgtgtagacggtattctcaggagatgattgagatgctgtctgagaataatttttaaaggaaaaccagtgttgtagaatatgttaagatttggtgctatgtgggctgtaggtaccttccttaagacctatttgtgataccactgagacaagacagctgagtgggatagatcagtaacccagcctagaacgggatgttgtaaacaggccattcactaccctggatctgagctttcccatctgtgaaaggataatggatttgccagtgttctttctagtgttgctgagcatagactgaggtgagggacacagaaaaaaaaacagtatatttccttttaaatagtttacctttgtttctgttacacttcagttattagaggaagtaacacaaggggatatgagtgcagcagacacatttctgtccgatctgccaagggatgatatctrtgtgtcagatgttgaggacgacggtgatgacacatctctggatagtgacctggatccagaggagctggcaggagtcaggggacatcagggtctaagggaccaaaagcggtaaggggcacgtgtgcaccaaagggaatgctgccactctraggaagtgttagggtgggtactaccagagcctgagtagggcagcaagggctccaggcaatctgggtctctgagccccctactttcctttgggtctacagtatgcgacttactgaagtgcaagatgataaagaggaggaggaggaggagaatccactgctggtaccactggaggaaaaggcagtactgcaggaagaacaagccaacctgtggttctcaaaggtaaggagaggccgggggcaagactgcggggagatgagtcttccttgggagaagggcagctgatgttctcctatcacagggcagctttgctgggatcgaggacgatgccgatgaggccctggagatcagtcaggcccagctgttatttgagaaccggcggaagggacggcagcagcagcagaagcagcagctgccacagacacccccttcctgtttgaagactgagataatgtctcccctgtaccaagatgaagcccctaagggaacagaggcttyttcggggacagaagctgccactggccttgaaggggaagaaaaggatggcatctcagacagtgatagcagtactagcagtgargaagaaragaggtgagtagttgcagctgagagaagggatggaaaggaagcgrtggcttgaaccatttctctaaattgggggttcttaatcttggctgcacatggggagggttaaaaatactgtactgacgatcctgatttaactggtctggggtacagcctgcatggcaggatttttgcaaattccgtgggagtgcggtctgagtagtacagagtggtggaatcactcagagtcctcccctcttcacagctgggaacccctccgtggtaagaagcgaagccgtgggcctaagtcagatgatgacgggtttgagatagtgcctattgaggacccaggtgagagctctgtatgcagtggaatgagaaaagaccactggaagtctcagtattgggaattgagctttgacctttctccttccctctctagcgaaacatcggatactggaccccgaaggccttgctctaggtgctgttattgcctcttccaaaaaggccaagagagacctcatagataactccttcaaccggtaaaggggccataaactcatcaagagtgacccagggtctggtgggtaaatgggtaattttttktttttgagatggagtctcgctctgttgcccaggctggagtgcaatggcacgatcttggctcactgcrgcctgattctccttgaatcgcttgagtcagccttctgagtagctgggattacaggtgccaaccaccacgcccagctaatttttgtatttttagtagagatggggtttcaccatrttggccaggctggtcaaactcctgacctcagrtgatctgcccacctcagcctcccaaagtgcagggattacaggcgtgagccacygtgcccagtctggtaatttctttagaaagcctggaatgttggatattagacagatgtcctttcyactcaggtacacatttaatgaggatgagggggagcttccggagtggtttgtgcaagaggaaaagcagcaccggatacgacagttgcctgttggtaagaaggaggtggagcattaccggaaacgctggcgggaaatcaatgcacgtcccatcaagaaggtggctgaggctaaggctagaaagaaaaggagggtaagtgatggggcctccagagattgggtggggtgggggtggggggatggggaagaggtcacctgacaggttcctttgcagatgctgaagaggctggagcagaccaggaagaaggcagaagccgtggtgaacacagtggacatctcagaacgagagaaagtggcacagctgcgaaggtaatgggaggacaccacaaaggtacacagggctaaaagtgcagcagaaagcaagcctctaacctcttctcttcccccctgtagtctctacaagaaggctgggcttggcaaggagaaacgccatgtcacctacgttgtagccaaaaaaggtgtgggccgcaaagtgcgccggccagctggagtcagaggtcatttcaaggtggtggactcaaggatgaagaaggaccaaagagcacagcaacgtaaggaacaaaagaaaaaacacaaacggaagtaagcagagctgccaggctcccaggagagcatggggactaggaggaagggtgtggcatggctcagtctggcccccttgattaccggcctagcccctgctcacatcacagctgtctgaagaacagtgaggtggagtgcctagaactcccgtggtggtcctgagcagagaggaggatgtcctcctgcctgcctgaaggtctcccatgaaaacactgctgaactgtgttgacactcatgaccctttttttaaaccgttaaagggaagttcggtgttggagcgatactcaatgtagtcagtctacacctggacgtgtgggccacttaagccctccccacccccatcctattcctraataaaaccaggataatggaagagttgtcttttctgacagttttaataagcacttccctatctgtccctacactgtgtgcggcactattcttaatatgtaccaattcatagacagaaatgacaaacgatccacaggtcccggtagtaaaacatttactagagagcaagcagaaaggaatgcacatcttaaagaaaccttcacaaagtcacaaaagtcaaagtttgtatatttcttttcctttttataaacgataaacaaaaatcatcaaaatcatttcagcaaaagacttttctatcattggggcaagttaaaaaaaatacaatgaratagaagacactttaaaagctgttgttgggtytcttgtttaattttaaatttagcaataccatctcaaacctggagcaatcctggaacagttaccaggatcaccttttcccttcaatccttgtggcttctgggaatcttcagagcctgggtctgaaaggtgtttcctacatgtctcagggctggatgcaaacctggctggggacctgagcatcaactcccatttagaatcagacatctcccttccctgcaaatgtctacaactaccaaattgctccccaacagttagctcaatggattgaatttgcagaagccaactcctaaaatggggactgcctggccatacaactaagaaaaagaastcaatttatagatgcttataaggtgacaccttagtaaaaaatataagctacatacaatataaacctagagtgagttttgtgccctagaagaccctttatcccaagataacctcaacttacccrcatgacaactcacctagagccaaaagaagcttcccagctctcactgcttccaaggaccaaaacagcttcccaagaaaacatccgaaaattccttctgatgaaggggtaatgtctccaagctccagctctccactaagggcagggggtccttacactttggaccccaacccagccctgagacacctagttaccaaaatctttctaaaaattaaggacaactgatttcacgctttagcacatcccctctaactgtcccatcgacttttcttgcgtttaggcggctctgggacagcaaagccgtcagctgtcttatctgtcttgctgtccaccttgtccatcttgctgctgtccactttgggttccatcttgggctccatcttgctctcacgattaaaagcttctttcctgctttccccattccgaccatcatttgcaccccggttctccccatgccggcctgcgcttcctccatgtctgttctccccgtgccgatggccatcagtatgacggctgctgctttctggatggcggtatccatctccatggcgaccaccatctccgtgacgtggactatcgctatgccgattgccagtctctccgtgactgtgacggctgctgccccggttctcagtatatctctctcttttcccgttgctgcccccagtcccttctcggctgttattccctgaagctgtgttgttgactccttgggctccggcagacgggtaggtcacaggggcaccactgatgttgccagtattgccaaagcctgggatgcccttggcggcactggtgacggggctgtcaggactgttatggccctgttgtgctgagttagttggaacagaattcaagctccctgcactagtccacccacttgccccagcagcagaacttccagccttctgattacttaaactggctgcaacaaagtgactcttgtactgtgactgaaagagaaagagacatcaggagtaggtaagatagcaagttcaagaaacttgaatatacaacttggcaaatgatgaggtttacagaaactctgtgctatcctggcactgtgagtttagtgtcctgatggccccacagtatggtcccttttgttcttgtgctataaaggaaaacttgtggatctctgtggagagatggacccccagtgttctgaaatgtacttttatagcctgattggctagaataaagcatctatgtatttagcacatttatctgcattcaaaaccaaaaagttctgaaaacttaaaaaaaattttcatactgcaatttaagtttgacagcaaaacctgccttgaactcattctatcgattcaccttagtgtgactatcagtaaattttgcttcagaagtgagttggaggtgggtgcctgggaggtgggcaacacttcaggctgttgggaagggagggaacacacaccctgctgcaggacaacaatcccaggccccaagtgtgactcaaagtagaccagcacaaggggttctctagatcaacttgcatttccaactaagctactgttaggtttatattcaaaatccaagcagcgtgaagaccctaaatctagcatcaagcctaggcgcccagctacaaccaggaaaactaagcccctctgtcactgcccaagagttactgctgaaagtgcttttaatgaaatgcttatttcagacctggaaagctgctttcattgccgttagtcgatctcccatagctcctgtggaaggcttgtaggcctcataattgctcattacattgttatttcctcgatcctaaaaaaataaacacatctatgagaatgaaaaaataagcaggaaagctcactgctatagactaggcctcattatgaaaacccttgaagtgggagctacaaaggaactggatacttttagaaagctgctactgctttgtgagaaaagacacagtgacaatcatttaaaaatgcttatgccctcaacccagaaattctatttctggaaattaaccctattaaacagaaatgcaatcagattatgcccaaagttgatcatgtatttacataaacacttccaattaattaagtaaaaattacgttaaagatgaaaaggccctgaatagcatattgtgtgactgctcaggccctgaatcaagaccatgaagggtctgaatttcggcttgaacacttgtcactgtaaccttaggtgcctcagcattgttatctgtactaacttccattcagttattttgaagattaactgagccaaaacatctgattgcttggaatggtcctggcacatataaagtgctcaataaatattacctattattatgcatcatcatcattattattataatgtgggaacagagtatgtaattacaaagatgccaagtttaatgctccagaaaagtatactggcagctttcttccctggcttggaatcaaggtgacagaaaacaggcagttaagaaaggccaccaaaagggtacatttgttacctggtttgtgagaaaaactagctcccgacttggaaattcctgatccgttcctgagtttaatgacaagatatggctagactttacagtgaccctttggcaacatttacctagcagcaggctttaggccagtgttgaagggcttataaaaccagactgctgggccccaactccagagtttctgattcacaaggtctggggttggggatgagtttgcatgtgctgctggtccagggaccacagtgtgagatcactgctaatctagaataatttcctgagcaagcctagtcaaccaagtacacaaagatgcttcttcaatagaaagttaccataagaatgagcactgcattgactcaaatcagattaaatacaaattcccttctagacagggctttaaactcactgaggctttcctgggtagatgagaatattcctaatgactttcaggacatgagaccaactataaaggcactactgtagtagtctagactcaccatgttctcagagcccaggccaggccgctccctgtagcctaggcctcctccaccaatgttcagcttttttcctttccctcctttgaatcgagatttccgaaaccaggcattctgcattgaacaaaattcaaggttaagtcaagggagggagaaaagaacagaagaagagaacgaggacaaagaggaaattaagtgggaagggggaacttttgcttaattttcagccagcactacgctaagggaggaattttcacaggaaccacagattggtttctctttggtagcataatccaccaaatttgaaaagtggctgagatccttatctaaggcttcctacagtgctccctccctcaaggctctcctggaagggaagttgttcaggtaagcttcaaacccagaggagtaactttggctacttctaacttccttgaggaaaatgagcttatattttatttctcaaaccatgtattattggacgtaaacatttggaacttaaacaactggtatgttcagaagcaaaggaaaaatgctatgtgaagtgaggcttatcagaactgactatagggacagactcccagaaaggatggtagccacacaactgaaaattttatttacccgcagagcgtaaaagttttcattgaacttgaccattgccactcaacatatttactcacattctcttaagaatgcagggcggtggctcacgcctatgaatcccagcactctggaggccgaggtgggcggatcacttgaggccaggagtcaagaccagcctgaccaacatggtgaaaccccgtccctactaaaaatacaaaaattagccaggcatggtggcacatgcctctaatcccagctgcttgggaggctgaggcaggagaactgtttgaaccggagacgcagaggttgcagtgagctgagactgcgccactgcactccagcctgggtgatagagtgtgactccatctcagaaaaaagaaaaaaaaaaaaaaaaaaaaaaagcaaatgtctctgggaaggttaaagttttatctgacaatcacatattaccagcaaaataaagtgcttgagaggtagggcagcaggcttggacaaagtcctgagcacagaaagcctgaggtacaaaaagaaatggaagaaaatgccaaagtcaaaatgtgtcctgttttaaaagtttatttaggactagctctctgtgctcaggagcaggggaggaaacattattctcttctctcctgcagtgcaggtcctttactcctaggaccagaaacttgggcactgccacattgcagctgggttgtaccagttgtgtgagctggcctaggcatttgacaaactcttaacagtttctgctctcagaaagtgttccgaacccatttgtaatttggggacagcatggattcagatgactccaggtttgatttgttagaatgcctcacttagctttagattggagcacacctggaagagggcaatcagtgtggtcagaggtctgagatctctgcaaggaacagttaagaggcaccatacaggctgggcacggtggctcacgcctgtaatcctagcactttgggaggttgaggccgaggcgggcggatcacctgaggtcaggagttcgagaccagcccgaccaacatggcaaaaccccatctctactaaaattacaaaaattggccaggcgtggtggtgggcgcctgtaatcacaactgcttgggaggctaaggcaggagaattgcttgaacccaggaggcagaggttgcagtgagccgagatcgtgccattgcactgcagcctgggcgatagagtgagattctgtctcaaaaaaaaaaggtgggggggcactatactatacacatattgttttaaaggcatcacacatttttagcctcccagaagaaaaattttgtgggggaagagcagtaaggagaatagtaaccatctttgagattaaatttactcctaagtgtgctatggggtagaaattacagcgacagattttagcacaaaggaatagcttttcaaaacagatgctgttgaaagaagaagaccagataagactagatgaattttagtatctcacaattcctatctgtacctcataagccccacatcctcctagccacccaactttcttgtcaagtttttatgttatctgttccaggactgctaaaatgtcttggtcttataaccaggagcaattgaaagtgtgcccagcccctcacctgcattgccagatctaggagttccttagaaacgtgttgattggctccttccaagttccggaccaggtcaccagcaaaattgctgtccttgggagtgagtagggtataggccacacctttctcacccgctcttcctgtgcggccaatcctatgcgtgtgggtatcaatgtctcgtgccacatcatagttaatgacagtcttaattgaaggaatgtccagaccacgggctgaaataaaaagcaaccaaattcttttattcttcatctgtagtcagaagatcaaagtaaccagaaatgctagtgctaataagccacatttcctttatctaggcaaagcgcatgggtttggtgagctgagatacaggcatgttaagtcaccaccacagattctatgatgttaggccttctagtgtaagggacttttattttttagagacggagtcttgctctgttgccagacgggagtgcagtgccatgatctcggctcactgcaacctccgactccctggttcaagcaattctcctgcctcagctttccaagtagctgggattataggcacgcgccaccacacccagctaatttttgtatttttagtagagacggggtttcactatgttggccaggatggtctcgatctcctgacctcaggtgatccgcccgcctccacctcccaaaatgctgggattacaggtgtgagccaccgtgcccgactgggacttttatcttttgcatcagtaatctgccatgccctcttctcttgcactgggaatatatatttaaaatgtgtcatgaagctgagaagttctctcctttctaggaaaaaatatcagtgtttaagggtagttattaaaacttgaca

SEQ ID NO: 96105 - DNA, 57475 bp, Homo sapiens
  misc_feature (1)...(57475): n = A,T,C or G
tgatcctactgtaattaaatgtaccttcactaagcatatcgccacagtaggtactatgccaagataaagcacaattcctgaactgaacataaatttgcacaggaattcagcttcaaggacatgtgctacaatattatttatgatggtgaaatttggttaaactctttggttaaactatggatgtatcaaaaaccaaagctactgttgtccattaaaaattgttacatagggtggtggctctcccctgtaatcccagcactgtgggagactggggtgagtgaactgctcgagcccaagagttggagaccagccttggcaacatggcgaaaacccacctctacaaacaaaatagaaaaattagctgggtttggtggcatgtgcctgtagtcccagctactcagggcactgaggtgagaaaattgcttgagctcacgaggccggccgaggctgcagtgaactgtgatcatgctaatgcattccagcctgggtgacagtgaaacgtgcctcaaaacaaaacacaaataacaaaagaaaaacccccaagtaattaaaaaaaaattgttacacagcctgggcaacacagtgagacttcccctctacaaaaaagcttttaaaaattagccaagtctcacgctcattcctgtaatcccagcagtttgggaggccaaggtaggcagatcacttgaggtcaggagtttgagaccagcctggccaacatggtaaaatcctgtctctactaaaaatatttaaaaaattagccagcgtgtggcgtgacttgtaatcccagctacttgggaggctgaggtatgagaatcacttgaacctgggaggcagaggttgctgtgagctgagattgtaccactgcactctagcccgggtgacacagggagactctgtctcaaaaaaaaaaaaaaaaaattagccaagtctggtggtgtgcacctgtagtccagctattctggtggctgaggtgggagaatcacctgagcccaggaggttgaggcttcagtgagccatgactgcgccactgcactacagcctgggcaacagagcaaggctgtctaaaagaaaaaaaaaaaacaaaatgttacaaatgaagtcgaaacccagatcattttagaagcaaatgcacataaagaaaaaggtttggctgtgtgcgatggctcacacctgtaatcccagcactttgggaggctgaggtgggcagatcacctgaggtcaggagtttgaggccagcctgaccaacatggtgaaacctcgtctctgctaaaaatacaaaaattagccgggcatggtgacaggcgcctgtaatcccagctacttgggaggctgaggcaggaggatcgcttgaatcaggaggtggaggttgcagtgagccgagacagcgccattgcagtccagcctgggcaacaagagtgaaactccatctcaaaaaaaaaaaaaaagaaaagaaaagaaaagaaaaagaaaacaaaaaagtttaacagggatgtcaaattttttggtttccctgaggcacaacggaagaagaataattgtcttgggccacacataaaatacactaacactaatgatagccaataagctaaaaaatatctcataatgttttaagaaagtttacgaatttgtgttaggccacattcaaagctgtcctgggtcacatgcggcctgcaggccatgggttggacaagcttggtttagaaaaacatacatttacatacaaatattagttagcttgtatggtagaattctggatattttgtctttatttttctttctttttttttttttttttgaggcagagtctcactctgtagcccaggttggagtgtagtggcgtgatctcgggtcactgcaacctctgcctcctgggttcaagcgattcttctgtctcagcctcctgagtagctgggttataggcactcaccatcatgcctggctaattttttttgtagtttaagtacagatggggtttcaccatgttggccaggttggtctcgaactcctgacctcaggtgatccacctgcctcggcctcccaaagtgctgggattacaggcatttacaggcatgagccaccgtgcccggactaatttttttttttctgtagtgtacttttgtcactagagaagaggcattgcagactgcggaacaggtttggcatggaggcctgaaatagcatattttaggagcctggtatgataggacattgggtttgtagactcaagtgggagaaaggaggctggaaaggccctcaggggccaggtcatgatgaaatcattactggcaactgcagggaagtgataaggatggaagccataatgcaagcaattgagtattaacggaagtgagagtatggcaaagggaaatatgtactactctttcaaggtgctctgagatggagaatattctaaatctcatttatagcactgaaacttcttaaagaaatcagtttaatatcgaaggttattgtcgaatgccttgcaatccatggatgctcaagaaattaaatgctcttaaaggctgggcgcagtggctcacacctgtaatcccagcactttgggaggccaatacgggcagatcagcggaggtcaggagttcgagaacagcctggtcaacatggtgaaatcccgtctcgactaaaaataccaaaaaattagccaggcatggtggcacacacctgtaatcccagctacttgggaggctgaggcaggaaaattgcttaaacttgggaggcggagattgcagtgagccaagatcatgccactgcactccagcctgggtgacagagcgagactgtgtcaaaaaaaaaaaaaagaaagaaagaaagaaaggaaggaaggaaggaaggaaggaaggaagaagaaagaaagaaagaaattaaatgttcttagaattaaagttcataaaatttgaaaggtacaaatgattttgagaaatgccataaaggataggccaacggtacagtaggccctacccatgggttccacatctgtggattcaaccaaccacagatggaacagatttggaggcaagaacagttaaaaaaaaatacaattaaattaggtattataagtaatctagagataattatatagtgtatatacatatacatatataagtatatggtaggaggtgcataggttatacgtaaatactacaccattttatataagggacttgagtatccatggattttggtattctcaaggggtcctggaaccaatcccccatacatatcaagggagaactaaacattctttttatactagttgatccttcaggttagtatcaagggacaatctatgggaaagcatgccactttgtcaatgccagcctcaaagaggtatgggatgtgtctctaaacatccctagcttcctttaaccatctttagttactaatgagtgtttttaaactctggaatgtatattttccacttccactaggcctaagggtcttcagtcctctaaattactacctgttaaagtttctcttctagtttttctaggctttccctctagttctcatgttgtgatatttggtcaaaagtggaagaaatatagaaaacagcacatactttggtgaaattagacttggtttaaaatgtcagctctaggccaggcgtggtggtccacgtctgtaatctcagcactttgggaggccgaggtgggtggatcatttgaggtcaggagttcgagaccagcttggccaaaatagtgaaaccccacctctactaaaaatacaaaaattagccgggcgtggtggcaggcacctgtaatcccagctactcgggacgctgaggcaggagaatcgcttgaacccgagagatggaggttgtagtgagccaagattgcgccactgcactccagcctgggcaacagggtgagactctgtctcaaaaaaatagataaataataaaataaaatgtcagctctaccatttaccagcaatatgaccttagcctaattacttaaaattccctgttctccacatacaaaaaagggataccatttgctacttgcctcttagggctgcagtgggtattacgggagatatgtaccaagggtttttttttttttttttttttgagacggagtctgactctgtcacccaggctggagtgcagtggcacgatctcggctcactgcaagctccgcctcccgggttcacgccattcttctgcctcagcctcccaagtagctgggactacaggcgctcgccaccacgcagggctaattttttgtatttttagtagagacggggtttcactgtgttagccaggatggtctcgatctcctgacctcgtgatccacccgtctcggcctcccaaagtgctgggattacagacgtgggccaccgcgcccagcctccttttcaaatcctactcttaaaacttttttttcatatagaagcaactaaaagttaacaccggaacagtcaactcgattaacagcctgccaaaagatccgatcatttcaaattgaatttccaattagaatattcacaccatagaaacacttctgagataactcagcactataatggagatccttcaaggttatttaggttacaatcatccaagccatttttaccttggttttccctcttagaagtctccgctgcacctgtcagttctcaaatgcacaagtccttgccagaccacccagcctctatgactcctgaagcaagcaacacaggaccaaggaaaattcacacaagcgctaacaagtctggtttgattattttctgcaagctcatccaatagttcctcagcgactgagtctagacttgaggaaagaggactgagtgaggccatcattccttgttgtcattttagattaggtcttcctgacaacggccaaaacgagtattctggaaatcatgcagactttcctctgtctctttatatgtgttggatacaaacacgtttcattttagaaacctccagaagagactggccacagaggtttttgcttctattaaacccctttgcctagtttctccccacccaagagaatcaatacatcctaatgtcatcctccggcacacactgtacatttcctctaactctgcccttttggctatcatttgctcacagctccgtgggaaagttcccccaaaccattacaattatctcaaccggaccgggctacaggccaagcaactcggagtcaccgctcggcctggcccggccacgccgacgagcgcgtcctggcccgctccttacctgtggccgaagccgaaacccggcccagcgccctgcgtccgacacccctgcccggcctgcctctcggcctggccgccgcctccgcgatcgcagcggttttactgccccggatgcctctaggacgcagccagaaccgtagctcagtcacgccgcgcctctcttcacgtagcctccgccgtccgttacgtagaatgcgagcggctcgtcagcgcctgcgcgcagcctgcggggcgggacgcaaccccggggaaagcgcgagacctccctctctcccgcccggctgaggcgaggtggggcttttgggaaaattacataatccccgcccctgggccggaactgccctcgcctatcccaatcctcctacctaggattccgtcaagttgacgtcacacggaaccggtgctccggaagctaaaggtggccatgctgtgtgggaccacgtggccagaggcaagagtgtcgctctagtagtatatgcaacagtttaaactataggcatgttcatgtaaatatggtttctgtccaacccgttttctcttgggatttttggctagccccttgacgccactttttcttcattcgcagacccactttctagatgggtcatgaacactgtccacccaactgcagtttcccgtcagagtatctgaggagcctgtgaggcgttctggagctttaaggtcaggcgccttccgggagccgtagccccggccccgcccttctgcccgcgcgttcctcactgcgcatgtcgcgtttttgttcccctccccccttcagcaacgggccgtgaggcggtggcggtggtggcggtggcggcggcggtggtggtggtggcggcggcggcggcgaagggggcggagaggaaggagcgcggcgggaccgggccgggacagcgcgtactttgggctccgggattcgctccgcgcccgcggttgtagcagctgccgctgcagccatagcagcaggtttgtgcgtggggkttctggacgcaaggccgccagtccttgggggcactggaggcaactgctgggcctagcgagggcggaggaaccgcggcctcgcttaacaaagagtcggcagagcctcggggcacyggcggccggggtgccgggaaggggtgggagtgggggctgaggcctctagggttccttcctagccgcgtcgccctcccacagctcccgcttccctcacaagtcttaccgaggcccagttggcggctttccggaggcggcgccccctcgcctaggaaaaggatttgcagggtgcccggctccagggcaggaatagcgcggggagaattctgacccaaggaggcagcgcttgggagatgcaggcctccgaatttggggtcctgagaggcaaaagctgccaaatgagaggagtgaaaagatataggcgatgatctttgtgcagcsttgagtaggtcgattattagcatcactgtagtcacacaaacttttttgcggcctacttgagagcgtatctgatgtgaataaataatttacatggaattgcaaacatatgcatcaaaaacaggagaagctgtcgagagttttggggaattacattctcatcactgagaatttccctcttgcccccactcctataggcagttatccaatttcttgtggcttccctgtgttttctttttgtcaatgatgtttctatgtctgtcctctctcgtatacacacccaggacttcctcaagcgcagggactatgtcttaaggcgctttgcagagccaagctcatttctggcacataagaggtgagcaatgagtgtttcgtacaaaaattaatgtttatattttgacagctgggaaaagaaaatatatcttcctgtacctggaagaagcattgtgtagcctaatgtgcaattcgttcattcaaggggtatttttattggtgcctattctctagcgccgttctaggtgatagggataggtgttagacccctgcctttggggaacttaactttctagtagcgggaggagaggcaaacagatacatatattatactgaatgttagaagatgatcagtatcttagggaaaagaaagctggaaagggggttggggaggtggtggtgttggaatttgcaataaagtggtcagggaagtccatacagacaagctgatatttaagcggactagaaggtggagtgagagcctacgtttatctggggaaaggaacgttccaagctagagaataacaaacataaaagccttgaggaggacaaagctggcccgttaagagtgtgaagaccaacgcgtttggagcactgtgagctgagggagtattaggagataaggtcagggaagaattgggggaagggagtgagcggaacaaccaaagccttttaggctgttacttaggaaggatctgagggtttcgatcagaggaatgataatatctgatttatattgtaacaatttaatataagagaggagtgcagttatttaaatttgttttgttacattgatagtcatataatcagctcttagttgctttaagctgacaggagaagggatgcttctaaaataaccataacctagcrtttacttgtatttggtttagaagaatgtgattacgttcttgagtttttatttagattctcatcaaagaactgacctgtatatagtgtgtgaggtactctcaaagtatatgtagagtagatgctaatcactgtcactagaactcttccttccacctccaaaaatacaagtgataaagtaatgtggcttatataatcagttgtttttagtccactatatttaaagtcatttagatcatatcttattttccgccattgccgaaaacacaaactagctaaattgtcttcctttataagtgtgttccacatttattctcacttcctagcctttgctagttcagtctttctccctggaatgtcttcgtctgcacgtctctacccagctttcatctttctgtgcctagcctggcttctgactctgttatgacacttgcccttgcttgttagctcatggtgatctctgacatcttcagtgttcttgtggcgcttatgtatgaaatacctgagttgaaagaagtctgatagtctcaatttaccgatgaagaaattggttcttcagaaataatgtaataatgaaaaacacgatggtagctgacatattgaacaagtacatttttgtgtatgaacttaatttttcacgccaactcttgagataggtgatagtctcatcttttttttttttttttgagatggtgtctggctgtgttgcccaggctggtcttgaactcctgagctcaagtaatcygcctgcctcagcctcccagagtgctgggattacaggcgtgagccaccacacacagcctcttaccattttttatagatgaggaaactgaacccagagaagctaaataacttccctgaggttcatatcaagttagtagcaaagatagtttacacatagcctgtgctactttactattctgttaagatttcctaggaaaccaccgtgttttatttattttttagagactgtcttgctgtgttgcccaggttggagtgcagtggtccagtcagctcattgtaacctggaactcctgggttcaagcaatcctcttgcctcagcctcctgagcagctaggactacaggcgtgtgccaccatgcctggctaattttttaaatttttttgtaaagacagggttttattgtgttgcccaggctggtctcaaactcgtggccttaagtgatcctcccaccttggcctcccaaagggcgaggattacaggtgtgagccaccttgcccagccagccataggatttagtgcctagaaccataccaaataggacttgatgccatcttgactgtttctcttcagcctagttgtagatctcctttagtcttttacatattgaataaatgagtatctaatattgaaaacatgctataagagaaaagtgaataagcctgtttcttcagccatgaatcctataatacggagttggactggaaagggagtttgaggaaggagatgccatttctttttctttctttttttttttttttgagacggagtctcactctgtcgcccaggctggagtgcagtggcgcgatcttggctcactgcaagctccgtctcccgggttcaagtgattctcctgcctcagcctccggagtagctgggactacaggtgcccaccaccacgcctggctaatttttttgtatctttaatagagatggggtttcagcatgttagccaggattgtctcgatctcctgacttcgtgatccacccgtctcggcctcccaaagtgctgagattacaggcgtgagccaccgtgcccagccaggagatgccatttctttggggatatcatattcatgtctttaggagttggtatttgagatatgctttgaaggataggactttggtaggtactcacagtttataggaaagagatttgatgtgaaggggatccagttagagggaagaggattcactagagtgcttgttttcctggaaaactgagtacgtgtggagagaccctgggaaatatgaatggtaaagtagtttgatgccacaatggagggtctcattccagcatgattaactgtggagagctatggaattgaggagagtgacataatcagaaatgtgtgttctggaagaacctggaaagggttttcgataagcatctgaatactgacctcccttctgtgagactttttctggttccacggtattaacacacactatgctactctaccaaaggaggtaaaacttgcttttctcttttcactgtgtgtctcactattacttcatcattttatgctttactaaacagaatcacttctcatagactatggaagatttgctggttttagatgaagcatctggatgtacatccacattacttttccaataaaacagacattcttgggacagtagtcaggggaggattacctgtcaaatgtcattcatctcagagaggccttgcctgacttaagtctgcaatagcttgcctcttaccctcttgcttgcttttcatagcacttttgctacctggaattacatgatttagtttttctttctcctgggccagactgtgaactctgagtatggctgcatctgattccattactgtatccttagcaccttagagcagttactggcacaaaataggcactcagtatattttgacttagtgatcactctagtagtgctgtgagagcttgataataaagttttttttttttttaagacagcatctcgctctgttatccaggctggagtgcagtggcacgatctcggctcactgcagcctccgtgtcctgggttcaagagattctcctgcctcagcctcctaagtagctggaactatgggtgcgcgccatcacgcctggctaatttttgtatttttagtagagatggggtttcaccatgttggccaggatggtcttgatctcctgaccttgtgatccgtccacctcggcctcccaataatcagaaatttttttttaggaaataattgcaatagtggaggtggagatggaaaggcgggtatacgtgagggatgtccctcatagtactgggcacataacaaaatcatcagtggttattggtcagtataaaacaatggatgttattactaagaaccacttagggttgttcttttttaaacaaatactcattaaactttgtttatggctctattcagctaattcttttcaaattaggtatttcaaaagggttcttttttaaatttttattttttggcaccccagcaggaaatgaagaaatcttttttaagagaaaaaatacaaaaatgcagttgaatttccccaagtgtgttttttttgtttgttttggttttgtttttttgagacgcagtctcactctgtcacccaggctggagtgcattggcatgatctcggcccactgcaacctccgactcctgggttcaggccatcctcccacctcaacctcccgagtagctggggctacaggtgcacaccaccacacctgggtaatttttgtattttttgtagaaatcaggtctttcattgttgtccaggctgacctctaactcctgagctcgagccatcctcctgccttggcttcccaaagtgctgggactgcagttgtgagccactgtgcccacctcattttgttttcttcttttggtactatcaccacaatctagccacaggacacttttcatcttgtaaaactgaaattctgtacccattaaacaataacaccctattctcccctcctcgcagcccctggcaaccactcttctactctgtgtctctgagtttgactattctaggtatctcttttttttttctttttgttttctttgtagagatggggtctygctgtgttgcccaggctggtctcaaactcctggcctcaagccatcctcctgcttcccagagtactgggaatataggcrtaagccactgcatctgcctcttttatttttttagtaaccaaatagaaatttgggtggctatcttttgcttcttctgtcagctatactcccacaaatctctgtgattgtcaaggttcagtaaccatatacactacatggtttaatagtaggaaaaactgccgggcacggtggctcacgcctgtaatcccagcactttgggaggccaaggcaggcagatcaccggcggtcgggagtttgagaccagcctgaccaacatggagaaaccccatctctcctaaaaatacaaaattagccaggcgtggtggcacatgcctgtaattccagctacttgggaggctgaggcaggagaatcacttcaacctgggaggcggaggttgtggtgagctgagattgcgccattgcactccagcctgggcaacaagagcgaaactgtctcaaaaaaacaaaaaaaaaaaaaagtaggaaaaactgttgtcaagagacttaagtaatgatccattgaggatgatctggcttagatttaatcaggaagggtggttagctagataacaaggtttgtagtaataaaatagagttttcataaatactgggatgaattttggagagcctgaatacattacatttattcatacagcaaaattttttgagtactatgcagacaccaaggatatagtgctggacaaattgagtcaagtctatgccctcatagagctaacattctactcagggtatatagaaagcacagttccttggccttcctagagtcagtaattgagggacaatgagctgtgtgttctagatgagctagggaaaggatcgcttttccaacttgctaagtcttgagagccagtaagcaaccctcacctgcccaaggtctcactgcctgcctgtttgtggcaggagttgatttgctgcttttgtaatatgaaccttttgattatttaatagggctgattcatagtcatgtttgttcttttcactccttccctctagctttgggggaagagtgagttactcctgttgttaaaagttttgattgtgtctggtcttctctggaaatcctatgacttttttctgtcattttgcatcttcagtttttcagactttactggtttttcccctttagcatataaacatgcctatgtttctttaaaaaataaaatttctgtaggtaatgcttcactttctccttcctatcattgataaacagcctacaaagtactcttgactcctcttgacctagtcttcatcttctactacttacttgccaggtactcctcaaccctgtccctactgctccattgaaactgctttcactsatgactcctggttgcctatacaacagaagaattttagttctttttgttttgtttttttgagacagagtctcgcactctcgcccaggctggagtgtagtagccggatcttggctcaccgcaagctctacctcccaggttcatgcctttctcctgcctcagcctcctgagtagccggaactacaggtgcccgccaccacgtccggctaattttttgtatttttagtagagatggggtttcaccgtgttagccaggatggtcttgatctcctgaccttgtgatccgcctgccttggcctcccaaagtgctgggattacaggcgtgagccaccgtgcctggcacattttagttcttaacttacctaacttctctttagttttctgcctatagagcttctttctcctcacccgtgttcctccttgtctccccttccttctttccccctcttctttctttcccttccccaatccctgttccatctgaagtttccatgtaagcttctctttttctgcccattcctaaatagtgatatatgttaagaattgtcttactgggccggatgtggtggctcacgcctgtaatcctagcactttgggaggccgaggcaggtggatcacgaggccaggagatcgagaccatcctggctaacatggtgaaaccccgtctctactaaaaatacaaaaaattagccgggcctggtggcaggtgcctgtagtcccagctactggggaggctgaggcaggagaatggtgtgaacccgggaggcagagcttgcagtgagccgagattgtgccactgcactccagcctgggcgacagagtgagactccgtctcaaaaaataaaaataaaaaaaraattgtcttaccagctgggcgcagtggatcacgaggtcaggagtttgagaccagcctggccaacatggtgaaacctgtctctactaaaaatacaaaaattagctgggcacggtggtgcgtgcttgtaatcccagctactcgggaggctgaggcaggagaattgcttgaactcaggaggcggaggttgcagtgagccaagatcatgccattgccctccagctctgggcgacagagcaagactccgtcttggggagaaaagaaagaattgtcttacttcttttctcactctgcatggtctctctgctagcttatttacatcagtaacctcaaatgcaaatggcttacatcaaatctatagctcactccggacccctctctgcagttactgcccctgcttggcatctctactcagctctctcatagatactgaactcaccttttgcctrattttgcaaacctggctcttttaggtttccatctccattagtggctccacagttcacccagtctttaaagccagaaacttctgaagttattctagactcttcttccttagcttccacaccaattactggtcacacaatcctaattgatctttcctcagatatctaaataaataactcagatccatcccccgtttctcctttcccacaggtgctttcttagttcagaattttgtcgctttatacctgcgttgctgcaacagccttctactttccttgcctctaccatgagtatctctcattctgtctttcaaaaacactgatctgaaaatttcccttctgtgtaaaattaacgattctttgtagctggcagaatacagttttgtatggtacgtcgttagcatagccttctaagctgttcatcttggccctacctgtctttctgaacatgtgtcctgcaaatttcccaaatgtgctactgaactctagctgcactgaactatttcttgttctctgtggtarcacttaacagatccttccatctgaaatgcccttctttaatgcctctttgatctaatgcctcttgaggtttcaaaatttaacatgtcatctctcagaacacttctatgcctttgctcccactcatggaccaccagtgaatgcactctgtatagtacgtctgttagaacgcatcatgttgttttcagctgcctcagactgcactgtctactccttgagaacagggactgtatctttcatgtatgaatgcctagcacatcatataccacctgaccttctcagcaagctttcagtaaaccattgaaagttttcctgctaggagattgtgtgattcttaaaatccacctgaacgtaaatgtctttccactatcctttctttgccttctcatccttatggcttattagctccttgttatacattgtatacactaggaaaaatgagattaaaattgagcccatcctttttgttgcttgggaacacctcttgtaaagatagcttatagattagtttaaaaacgtcagatgctgaaattttcttgcttgtaaagattcttactaaatttcatcacactggaattaygttgattccttgattgaaggaatccccttatgggattccgaaagacagcaggagatgaagttcaggtaaattagtacttactaaatacataccttagtcattctcactgttagagaaggaagtccaaaatgagtaaagacagtttctatctggagttaagggtctaagtagagattgatgtagtgtaattcaagtttaatactaagcagcctgggtgccgtggctcacacctgtaatcccagcacttcgggaggccaaggtggttggattgattgaggtcgggagtacaagaccagcctgcctaacataacgaaaccccatctctactaaaaatacaaaaaattagctgakcctggtggcacacgcctgtaatcccagctactcgggaggctgagacaggataatcacttgaaccatggaggcagaggttgcagtgagctaagattgtaccactgcactccagcctgggaggcagagtgaaactctgtctcccaaaaaaacaaacagacaaacaaaaaccttaaaactaagcaaacaactaagtgctgtgtataatagcagttgaacaaaacctatgaagtatatatagacaaggggtatagaacagtgcatgtttctgatctcttcgacaatgttactataataaacagtttttggaatttttttccaccctggcttcaaagctagtggaaattaaaattaaagtaaacattttaatttttcttactaatggtaaacaaaataaaaatcaaatagctgctgttaacattttgataaacagcctgtcagctgtctctgtatatataactcatggtttttacataaattaaatcatactacccaccttgttttatgcccttattttactcaatgtgtaatggatactttttcataaatgtaagtagtagttaaaatttttaggccaggcaaggtggtgtgagtcatgtctgttaattccagcactttgggagactgaggtgggaggactggttgaggccaggatttcgagaccagcctaggcaacatagtgagaccacaaaaaattaaaataaaaacccaggcatggtggctcatgtttgtagttccagctactcaggaggctgaggtgggaggatcacttgagcccaggagttcatggctgcagtgagctgcaatcagaccactgtaatgcagcctgggtgacagcaagaacttgtcttaaaaaaagatttttttttttaactcagaatgcattttcctttgagcagttgcattttaaaacttgttcctaaggaaataattgaaggtatgcacaaagatgtagctataatgatgtgttttgcaacattgtgttaccagtattatactgtcaagtagtgaagaaatagatatctattgacattaaacaatatcacagtatatcattaggtgaagaaatcactaagacaatatgtacagtatggtttcaatttttaatttgtgtgtatatrcacatatgcatacaagtagcaaaaaatagaacaaaactacatatctgggagaggaaatttcaggtagttttaaattttgttcttttttgctttctgcttttctgtaaaacttaggtaagttgtatcattaaaaagggttttggggggccaggtgcaggggctcatgcctgtaatcccagcactttgggaggctgaggtgggtggatcacttgaggccaggagttccagaccagcccatctctactaaaaatacaaaatattagctggatgtggtggtgcacacttgtaatcccagctacccaggaggctgaggcatgagaatcacttgaacccaggcgacagaggttgcagcaagccgagattgggccactgcactccagcctgggtgacagatcaaggctctgtctcaaaaaacaaaaaacaaaaaaattttttttgggccaggtgcagtggctcatgcctgtaatcccagcacttagggaggcagrtgtgagaggggggggtctcttgaggctagaagtttgagaccagcctggacaacatcacaagaccctgttccttaaaaaaaaaaaaaaaagaaagaaaaggtttttggagccaagactaatgtaaggtattgtttgtaaattgattttatgaatgcacaagaaatttctttgtaactcttaaccacaggctaactgaatacttcaggcaacatgtcagtgaatcatagtttcttcctggatagtgtttctattgggcagttgttcaataaatacatggttcatagtacctttcctkcagacatgaatacatagatactgtctacaaacaactgatcttttaagttttgattctttgattcttccagatgtcattaccagaggataacctctagttttcggagagtcttggctgatagcagctcagtctttcatataaggatgaagatatttagtcttttcatatctccagtggccttgcacatatcagattccccaaaatatttctttttatgagtatttttgtcagcttaataagatgttaattagcaggcaaatccttttggaggggatgatattaaatactgcattctggtttataytgagatcccaataaaattaaaacaatttcttcagtgttttagaaaatataatcatttgttgaggctagcatggtgtgtatctgaaatacaatgtcaacttttgtgggttttgtttttgtttttttaagagacaggatttcactatgttgcccaggctggaatacagtggctattcacaggcaggatcatagcacactgtaaccttgaactcctgggctcaagcagtttacctgcctcagcctcytgaatagctgggctggaaatgaatctcttaatgagatggattttcttttcttgtcttttcttttttaatgtaaaaagagacaatctctgtcacccaggcttgagtgcagtggcgtgatcatagctcagtgtaatctggaactcctgggttcaagtagtcttcctgcctaagcctcccaagtagttggcattactggcctgggccactctcctgactacagtgttatagttttaattgagaagctaaaatttaaaataaaattttaggtggaggttggaagagacatacaactcagtggggctatatacttcttttttgtttttgagacggagtctcgctgtgtcgcccaggctggagtgcagtggcacgatctcagctcactgcaacctccgcctctcrgattcaagtgattcttatgcctcagcctcccaagtagctgggaccacaggcatgtgccaccacgcccggccaatttttgtatttttagtagagaagggttttcaccatattggccaggctggtcttgaactcctgacctcatggtccacctgccttggcctcccaaagtgctgggattacaggcgtgacccaccgcgcccggcccttggggctatacacttttttaagtttaatttatatttgtgtatcttattcctaacaggtcagtcattggcaccatgaactggaataaaggtggtcctggcactaagcgaggatttggctttggaggttttgccatcagtgctgggaaaaaggaggaacccaaactcccacagcagtcccacagtgcctttggggcaaccagctcttcttctggatttggaaagtcagctccaccacagcttccttctttctacaaaattggatctaagcgggccaactttgatgaagaaaatgcgtaagtggtaattcctggtagtgtagcaaagtttggactttgatatattcattctatcagcagaaattgaggcaaagaaactttgtttctcaaataataatgaattcttaaattatgtgtctcgctgaattccattgttcctaataagttaaattatcaggtttactcatttgtaaggaatgtaatacctgtggtgttacttatacctttactcattcagtgttacgtcctactgggctgttgctcactgtgggattagaagccattgaaacaggctgggcgtggtagctgggcgtggtggctcacacctgtaatcccagcactctgggaggccgagacggatggatcatctgacgtcaggagtttgagaacagcctggccaatatggtgaaaccctgtctactaaaaatacaaaacattagccaggcgtggtggtgcacgcctataatcccaactactcaggaggaggctgaggcaggagaatcgcttgaacccgggaggcacaggttgcagtgagccaagatggtgccattgcactccaacctgggcgacagagcaagactcccatctcagaaaaaaaccaaaaagccattgaaacataaatatggctgaagagttttatataattcatgtggtttttttttttttttttggaggcagagttttgctcgtcacccaggctggagtataatggygcaatctcggttcaccgcaacttcaacctctcgagttcaagtgattctccagcctcaccctcctgtgtaggtgggattacaggcatgcaccaccatgctgggctaatttttgtattattagtagagatggggtttcaccatgttggccaggctggtctcaaactcctgacctcaggtgaactgcccgccttggcctcccaaagtgctgggattacatgcatgagctactgcacctggcctggtggtctttactgcagtcttttactgacaccatataaattgtttagtaaacacaggccgttgtcagaactgatggaaatacaagtttgcttcaacatctgagtcttttttttttttttttttgagatggagtctctctcacccaggctggaatgcagtagcgcgatcttggctcactgcaacctccgcctcccaggttcaagtgattctcctgcctcagcctcccaagtaactrggactacaggcacgtgccaccatgcccagctaattttttgtatttttagtacagacggggtttcaccgtgttagccacaatggtctcaatctcctgacctcatgatccgcccgcctyagcctcccaaactgctrggattatacaggcgtgagccactgggcccgggctacatctaagtcttcaaaactagtatgttggaacgtctgatagtggtagaaaaatctactcacatttttcccatagttctcataattggtaaatgctttttaccaattaccgtttttaacttgctgatataataatgtggttagaaaaggctgggatttaaggggttgagttctaatttctatacaaaatatctctctttgctgaatctgaagaaatctcttgttgctattatttccaagctgattgtgacactgcttcactgcttgaggttttttttgttttgttttgtttttgttgttgttttgagatagggtctcactctgtcacccaggctggagtggagtggtgcgatcaaggctcactgcagtctcgacctcccaggctaaagcagttaagcagttctcccacctcagcctcctgagtagctaggaccataggcacatgccaccataccctgctaattttttattcttttttttttcttttttgagatggagtctcactgtctcacccaggctagagtgcagtggcgtgatctaggctcacagcaacctccacttcctgggttcaagtgattctcacgcctcagcctcccatgtagctgggattacaggtgcctgccaccacacccagctgatttttgtatttttagtagaaacgcggtttcaccaggttggccaggctggcctcgaactcctgacctcaggtgatccacccgcctcagcctcccaaaatgctggaattaaaggcctgagccaccatgcctggccaattttttattcttttgtagagacagggtcttgctttgttgcccgggctggtctgaaactcctgggctcaagtgatcctcccgccttggcctcccaaagtgctgggattataggcgtgagctactgcacccagcagatgttaattggaaaaaaaagcttctaaaagacttttttgtttttktttttgtttttgtttttttttttttttttttgagacagagtttcgctcttgttgcccaggctggagtgcagtggcgtgatctaggctcacagcaacctctgcctcctgggttcaagcaattctcctgtctcagcctccttagtagctgggattacagacatgtgccaccacgcctggctaattttgtatttttagtagagacagggattctccgtgttggccaggctggtttcaaactcgtaacctcaggtgatctgcctgcctcggcctcccaaagtgctgggattacaagcatgagccactgcacctggccaaaatattttgaaagtacacagtaatattttagaaagctgacatgttatttaggagtcaaatatacaagtagtgtttaagttttagcaaagtcagagatcattattctaaacagcagttaaccagttcaggctactttttcattagttaaatagaacacactatatacaggaggcagaggtggaaagactgcttgagcccaggagtctgagctgcagatagctatgtttgcatcactgcacatcagcctgtatgtcagagtgagactctgtctctaaaaaaacaaacaaaaaactaaaaacctactatatgaatgaatatgcatgagtaaatatgtgtatatatgtatgctatatattgcatatatattgcatcgtatagtatatagcgtgagtatgctattgctacattagtatacataacagttactatataaaggagttggcataagcatatagactatatattttaggccaggcacaatcgctcacgtctgtaatcccagcactttgggaggccgaggtgggtgtatcacttgaggtcagaagtttgagaccagcctggacaacatggtgaaaccccgtctctactaaaaatacaaaaattggtctgggcatggtggctcaaacctgtaatcccagcactttggaaggccgaggcgggcggatcgcctgaagtcaggagttagagaccagcctggacaacgtggcaaaaccccatctctactaaaaatacaaaaattagctgggtgtggtggcggcgcatataatcccagctacttgggaggctgaggcaggagaatcactggaacctgggaggcagaggctgcactgagttgagatcgtgccactgcactccagcctgggcgacagagcaagactccatctcaaaaacaaaaagaccacaaaaattaactgggtgcagtggcgtgcacctgtaatgccagctatttgggagactgaggcaggagaattgcttgaacctgggtggtggaggttgcagtgagcacagagatcacgccgctgcactgcagcctgggcgacagggcgaggctgtctcaaaaacaaaaaagcatatatactatatagtttagcctatattattgttacatatagtcagtgttacattagtgtgtatatatatgtatgcatgtgtgtatatagcataacagttaaagcttttaaaataattcctaggaagacttgaaatgctttaactttttaaactgcagttatttatttaaattaatatttggttatattactatttgagtttgagattaaagtctaaacagtggtttagtttataaagagctgtattgacatccttttctgaaatgtttgttaaagagaaagtgataccttatccagcctttgaagatgtcctttctgaatacttaagtagtatcttaaattattttggattgagcatttattttcttgcttttttcctcgttttttgagagagtcttgctctgtcacccaggctggagtgcagtggcacaatctcagttcactgcaacctccacctcctgggttcaagcagttctcttgcctcagcctcccgagtagctgggattacgggcatgtgcaaccatgcctggctaattttgtatttttagtagacacagggtttcaccatgttggctgggctggtctcaaactcttgacatcaagtgatgcacctgtctcggcctcccaaagtgctgggattagaggtgtgagccaccacgcctggcctgaacatttattttcaattccggaagttttctgttggtccccagaaaatagcccagaatttctgaggtttttggtcttaaaagaatatctcaagtttttattaagggttataaagaataaactggatttctaatgtttcagtaagtttccttttggctgtgcacagtggctctcgcctgtaatctcagtactttggaggctgaggagggcagatcacgtaaggtaaggagttcgagaccagcctggccaacatggtgaaacccctgtctctactaaaaatacaaaaattagccaggcatggtggcaggtgcctgtgatcccagctactagggagggcaaggcaggagaatagcttgaacccagaaggcgggggttgcagggagcccagattgtgccactgcactccagcctgggcgatgaggaaaaccccgtctcaaaaaaaaaaaaaagttttcttttttcccatagcacagctctttaatatttgtcatatttatctaacaatggtcagtaagtttgtactgaaaactcttcccttttaacagaactgggagcatgatttgactatacactattgaaatggagaatstcttgtgattacttttttgtaatattgaaattttgcatgtattaagtagtacttaataattaggtcattagccaaagccttggaggtctctmatttgatctgcattacatctcctaataataagrtataccataataaaaatgttgttaaatgaaagatttactgaccccaaagtaagcattcactttaccagtttgctttctaattctcagctattttgaagatgaggaagaagattctagcaacgttgatttaccttacattcctgctgaaaactcaccaactcgccagcaattccattccaagccagtagattctgacagcgatgatgatcccttggaggcattcatggctgaagtggaggcaagtatcaacatgtttcattaaaatatttagcagttagaaatagatcaagttaacttagtacttcaaatcttattcaaartttgttttctagtcttattatttttttttttttgagaattttgctccagtagtctatagttgcatatatctacttccacttgccctgtagtacttttgcaatgattggtggctagaaatttgawctgtaacccatgaacatggtagctctagacgtatatgtgtgtatgtattttattttaataatcttagcatattcttaaatggaattaatattcnatctagcatttgttaagtacatatttatgtaaggtaattaaacttaaggaacttgccaaaattataaattctgtattctgtagttttaaatgttatttcttcatcaacattcatgacctccctgtagaaatttaacctcatgaccacctccttgaaactcttctcactaggcttttgtgattttgtgttattttcctttttcatctttctgttttctgtttgtttttgttttcttgctatttttattgtggaaaaatttaaacacatacaaagatagaataataaaatgaaccttcatgtacctttaaccaactttattagttaacaacttttggccactcttgttttatccaatctctcccacctctgattctttcttttcctttctctttttttttttctttctttcttttatttttttgagacaaagtcttgctctgatgtgggctggctagagtgtagtagtatgatcatggctcactgcagcctcaaactcctgggctcaaatgatcctcctgcctcagcctcctgaatagctgagattgcaggtgtgcaccaccatacccagctaatttttaaagtttttatagaggtgaggtcttgctttgttaaccaggctggttttgaacttctagcctcaagtgatcctctagcctcagcctcccaaagcgcttggaccacaggcataagccactgtgcccaatccaattctgttttggattattttaaaatctcagacatataattttatccatcagtatttctctgagaacactcttacaaattacaaccaccatgttattgtcgcacccaaaaaacaaatcattaaatatccatctgttatttgtgatccttcttgccatcttcctccaatttttcacatacagaggtccttttacagctctctatattgattattatatagcagatcattaagaatgttcattatttaatttaatcctcaaaataatggtgggaaataggcagaaaaatttatatatatatatatatatatataattttttaactgataacaaaaccgagacccaagataattcaaatcacttgccccaaatcatattggtacttaatgtggcagacctggaactcaaatctaatttcgcttgcttagtagtcctgaaggtctagctgtttcccatacatcatgctgcctttcctcttctcattggccaaaatctgtcaatctttataatagcccttgcatttgttctttcctttctgttgccattgtagccatcctactttacactctcgtaaattctctccctgctttaggctctctgctgtcttattaggtagtatacagctacaggttaattagaccaaaatatgtttcttttcatgttattctccatacttaaaaactgtcactttagatggctggacatggtggctcatacctataatcccagcatttcgggaggctgaggcaggaggatccctcgagtctaggagttcaagatcagcctaggcagcatagcgagtccctgtctctacaaaaaataaaatttagccaggcgtggtggcatgctgctgtagttccagctacttgagaggctgaggttgtagtgagccatgatcatgccactactcagcctggatgacaaagtgagaccctttctcaacaaaatgaaaccaaaaactatcactttagactatgtgccgtagctcacacctataacccccagtattttgcagggccaaggtgggagaattgcttgaggttgggcagcatagtgagaccctgtctataaaaaaaaaaaaaawtttggccgggcacagtggctcacggctcacatttgtaatcccagcactttgggaggccgaggtgggctgatcaacagtttgagaccagcctggccaacatggtgaaactccatctctactaaaaatacaaaaaaaattagccaggcatggtggtgcatgcctgtaattcctgctactcgggaggctgaggcaggagaatcgcttgaacctgggaggcagaggttatagtgaaccgagatggcgccattgcactccagcctgggcaatagagtgagactccatcttaaaaaaaaaaaaaaaaagaaaaattgtcacttaattagttatgaaataaaatcctttcggattccttagttacttgtcttcagccagaatacacctctcctccaaggaagtagggaaagaaataatccaagattaatgtgtttttgtttggcctagacattgcttttttaaaatgtgagccaacatttttagtatcaggggatcttgtctaatagttcagactgttgaaaaaaggaagatctggcaatatactaagtctgtgtttttgtgtggcagaaagaggctattgctgagcaaatggctgcctacattagacaaggcatgcttttccttgctcaccatagttacatcaatccctgttttcttcttaaccttgaggccactgtttatagcaccatttgtcatttctcttgcactgtaatttttttcttttgagacaggatctctcgcccaagccagagtgcagtggcaccattacagtcactgtaacctcaaattcctaggctcaagtgatcctcctgcctcagcctcccaagtagctggaactacaggtgcacggcaccacaccaccacacytggctaatttttagaaaatattttttcccaggccggtctcaaactcgtagcctcaggcagtctctccaccttggcctctcagagtgctggaattgcaggtgtgggtctgtgcccagcctctgtattgtaatttttcttagggtggagaattatttttctgaacttagttctctatcagatatcagaaaacaaaagactcagggtgatgtaagaaaaattagagtacatttctgtagaagaatatgcctacttatttccagtttggtctttgaatttgccatctttgatttataacaacttaagttacttactgaagaatatacacctaataggtggcagagccaaaattcacctccaaaccccatattccttatgcagtatcattctgtatctgagttcttatagtgttgtgtatttctgccacttacaaactatrcaggatacttaccaaacacccagactattcagggtatacgtgtgtcttgcagcatagtaggtatttagttaatatgttaagtgatttaccctaggagtaaaggcaataaatgaattgtcatctttgagatgtcttgtatgcgttgttttcttcatcttcttgagatacgaacatttcctaatgggctatgtttcctagagaatctggtctcgttatttcttgagggatccctagtgatgaattaaaagaaaaattagctctgattttctgggtttaaatgtagatttatggtagtacaaactggcatagccctttctgagtgacagtatccgagaataggctaaattcttttgcttggccttttttctttttggagggaggaatggagcttcacccttgttgcccaggctggaatgcaatggctcagtctcagctcaccacaacctctgcctcccgggtcccgggttcaagcgattctcctgcctcagcttcccgagtagctgagattacaggcatgtgccaccatgcttggctaattttgtatttttagtagagacagggtttctccatattggtcaggctgccctcgaactcctgacctcaggtgatctgcccgccttggcctcccaaggtgctgggattacgggcgtgagccaccgcacccggcccagatgtcaaattttatagaaagtataaacttttctagtgcttgaactagatgaagatttatttttagccagtgttctgaaaaaggatttatgtaggcttaaacaatatgttctaccacttttggtgacctgtttcttatgttacattgcttatgtcatcttcagtttatagtcttaaatatatcttatagctggttcagtcctccgaaaagtaggttgtttgtatgcattgcttctctttaaaacaatttctcttcatcaggaacatttggtttgatagaacacccgatcatgccacagtatatatagtggcatttttaaaaatctgagattgccagaaaaactcacggtgctttatagtgagaaaaagttgtgcagaatgtgtataaagccttgggaaaaatcatttaactcttctgaccttgattttcaaatgtataatgcaaatgattaattttgatcagtgatcatcaatttgcrgtatataaaaattgcctaggccgggcgcggtggatcacctgaggtcacgagctcgagaccagcctgaccaacatggagaaaccccgtctctactaaaaatacaaaattagctggatgtggtggctcatacctgtaatcccagcttactcaggaggctgaggcaggagaatcgcttgaacctgggaggaggaggttgtggtgagccaagatggtgccattgcactccagcctgggcaacgagagcgaaactccatctcaaaaaaaaaaaaaaaaaagaattgcctatgaaaaatgtaaaaactacacacatttaactcactccagccccaaggattctgatttagtagatgtagaacagaattttcagccttgagactactgtcatttggcgctggataattatttgttgtggggctttcctgtgtattgtagaatgtttagtagccatcctccgcctctagaaaccagtactatcagctgtaccacccccaaaattaaaaatgtctccagacattgccagatgttgcctaggggcaaaattgtcccagattgagagcaacctttccagagtcagatgtatgtggtcttaagctatactttgaggaaggcckatctgcctgaattgaaagcactttatatctgtaattttatcattaacttaaagcaacttaaggttatgtatttgtgaagcaagcatttttgttcatttttccatgtgtggcacattattacagataaaattgtgcagtccatatacagccaatttatacagcatttagttatttctctttgaaaaataattgtcaaaatgcaatttgatggcatcaaaatgcacttgtcaaatacatagctaaagctattatggcacttgttccaatctaaaaattgtttctttcagtgtttttagttgatgtcattctatacagccttttgtttcattaggatcaggcagctagagacatgaagaggcttgaagaaaaggacaaggaaagaaaaaacgtaaagtaagttgttttcttctccctcacaaaggttacgtgaaaactgctgaagtattgcaaagtctattcccccaaagtttatagagaaaaaatattgacgtacacttgtgtactttacttgaagttattcctgtatyttgaatactttaagaatagagatggcaacagtctttgcatttgcaataattaaaaagcattcagtttggtagaatagtatttggtctttgactataaatagttgtttagtaaacacaaggaatgaattatagtagagtttaggggagcataattattaaagtttaggctcattgttctgagtttgtcgcataattaatataaaataggtttatgcctatatggttgattatgagaagtaatggcaactgtatcatgaaaactatgtatagttgaacctttgaacaacacaggtttgaactgcgtgagtccactcatggggatttttttcaaccaacacaggtggaaaaataatattcacagtataaaaacctgtgtataaggagggctgtaataatacctaattttatttagctccrgagtgacattgtrctgtagcagccatagtcagaacttgaagtactttattttctgggaaagagaagtctctttgccttgatgaataaactcctaaggctttttctgccagtcatgaytggacttttttctccctgtgcttggcagtcagtgcttcagtcctttaccagggtttctgttccatatggagatttagctgtggttttggtattcactgtatgtcatatccccttccacctgccctgcactggtggtgttgcttgccggttgccttaggaatagcaagcgctctaggttaggcagaaagtctgattagaaacagatggttgtgggaactaagcaaccatattttytytatagctcctgagacatacagcaagtggtgatggtccccttctccatgtgaactgtttaagcgttttattcccaaactcataaaggagttaatgtagttttcactctgtccccatccctaaggtaactgcttttggctgaaaaccatttaccctagagctagaaactttggggacaataagaaggttgtgacctttctagtatatgccaaatacaagattttttttttctttttagtatgaaatacttttcacaaccgcattgtttgttgtatggattcacaaaactaggaccatttggtatctgtcttcagaaagtttttacgtctgatatccttgttggtaaccgctgtttctaggggtatcatatcatcccatttaaaagaaatgcaaactgcagattatagagtgcagctacacatatatataatggggtggatagtttatagtgtgctcattgctgctttgttattattagtgttgagagttcctgtgctgtgtggaattcaacactaatctgctgtaagtatggagctgggtatgtggaacatttgcagggaagtttgtttctccgcttgtttttccaggggtattcgagatgacattgaagaggaagatgaccaagtgagttcctatgcagtatttctatcttttatttttatccacaaagtctrtactggggacaagctagagcttgccttcactcaraatggccattcctgacattcagcagggaatgtcatttgatttgctccttttgtacctgtgtgaccaattggtaatacatagattcacatggctttcccccatattgaagatggaatttttgatcaactgtgacatccaaagcaaatacgagctttattcagcttgcttctttttaaatccaaaattaatgtttattctgataaatcaagtggtagagtagtgtgggatctattgatggcctctggtaacatctaacctctgtctcttagtaagtgtcctgtttgtggttcttgtatttcaagctggaacattaattactgtccattagtctcttttcccccattgttcagttgtggagtgatgagaatcagagtgagtggtagccgtttccaggtttgtgacctttctaattagcgttaacttccaaacttggattgttaaagccacagcatgtgttctatggctctgggcagggttgatagacaccccactccaggaaggctgtggaacagacagatttgtaagtcttctattaaacaagttgcaacatttaatagtactaactgtttaattcatttcttctgattgttcttctgaatattgctattattaaaggaatcattgctagtaaggatcttgccttacttggtaggtatgttaactgtgcaattatctggtacactatgtgcgctaattacaggagcagaaacattctcaattgtacttgggtgtgattatgttcttgtgctttcctgcaggaagcttattttcgatacatggcagaaaacccaactgctggtgtggttcaggaggaagaggaagacaatctagaatatgatagtgacggaaatccaattgcacctaccaaaaaaatcattgatcctcttccccccattgatcattcagaggtatgrtgtttcttgctgaattttactcttgtttcaagctgatgctttacttcagctttaacatttagattttctcagtagtggaatactcttacatcatgagygtatgcatcttgtcatctctactaagtggttgagccacaaattccatgaggctttatagcctrttttgttcaaaagtataaccaaatcacttacatttgactttagaattaaaacatttttttcaagtaattgtacttgttttccagaaccaatatttctttcttttctttctttctctttctttcttttctttccttccttcctttctttcttttctttccttccttcctttctttctttttcttttcttctttctttctccctttctctttcctttttttcctctctttcttctttctttcttctcttctctttcttctcttttattttctttcttctttttctctctctctctgtctctctgtcacccaggctggagtgcagtggcacagtcttggctctctgcaacgctgactcctgggttcaagcaattctgcctgcctcagcctcctrggtaactgggattacaggtgcccactaccatgcctggctaatttttttwaaatatttttggtagagatggggttttgccatgttggccaggctggtcttgagctcctgacctcaggtgatccccctrcctcggcctcccaaagcgctgggattacaggcgtgagccaccgcacccagccttgacatctttctttcaaactgggaacgttttggcctgtgtttactgtttttgttgttgttgctatattgcccagactggccccaaatcccctggctcaagtgatcctttcacttcagcctcctgagtagctgggactacaggtgcacaccactgtacctggcatgcctttatttttttgtttattttttttccagacgaagtcttgctctattgcccaggctggagtgcagtggcgcaatcttggcttactgcagcctctgcttcccaggttcatttttagtagagatgggattttaccacgttggccaggctggtctcgaactcctgaccccaagtgatccacccaccttggtctcccaaagtgctgggattacagatgtgagccactgcatccggtcacatttgtttttttaattgctataaatttttactgttggtcctagatctggggcagatgagaggctgtttcttcacagtggagccagtaattacaggatccttaaggaatgaggacatcggtatacccacttgaaaaaatatcagtgtttcatccaggttaaatatcagccgagatctcacatacactaatgattctagatctggagcagtggttctcagtgtggaccaagaacccctttcagggagcctacagagtccaaacacttttcattataccaagattgttttcctttgttactgcatcaacatttacattgttggtgtaaaagcagtgataagtaaaactgctgatgccttagcatgaatcaagccagtggcaccaaacygttctagtaggcgtattctctgttctcagaccattgcagttaaaaagaaaaaaaaaggccagtttcactcaagaatgccctgaacagtaaaaattattaaagtcgtgacccttgagctacatgtctttttattctgtgtgataaaatgggaagtacgcataaagcatttctgttgcataccaaaatatgatagccatttcaaggaaaagcacttatgtgtttgagttgtaaggtgaactagctactttttttcatagaacaccactttcactggacaaaatcaatgacatttcaaggaaaacaattgaaagtgtttattacccatgatagacattcaagctttcggccagacgcaatggctcacgcctgtaatttcaacactttgggaggctgaggcgggtagatcgcttgagctcaggaatttgagataagcctgggcaacttggtgaaactccatctaaattttgttttttaataacaaaattcaggctgggtatggtggctcatgcctgtaatcccagcactttgggaggccgaggcgggtggatcacctgaggtcagcagtttgagaccagcctgaccaacatggagaaaccccatctctactaaaaatacagaattagccaggcatggtggtgcatgcctgtaatcccagctactcgggagagtgaggcaggagagtcactcaaatccaggaggcggaggttgcagtgagccgagatcatgccattgcactccagcctgggcaataagaacaacactccatctcaaaaaaaaaaaaaaattcaagctttcaagcaaaaattagaatttggaaaacttacatctaccacagtaggcttgacagcttttcagtacttaaagaccattgtgacaaaattgatggtgatattagtaactgatttttaatataatgaaatgtgttaacatttggatgatctgtatataacctcagtgaaccaatattttccaaatgatcaatgtatgacattacaaagtcaagcatgaataaaagctcaactcaaaatacatgataaataaatggattataatgtaacagagtgtgaaaacttcagtaatatggtttcagattacacaatgaaaataacttttaggaaatgaccacttgtcaagttttartgtaaaataaaaagtatctgaaaagggctgggtgcggtggctcatgcctgtaattccagcactttgggaggccaaggtgggcagatcacttgagggcaggagtttgagaccagcctggccaacatggtgaaacccccgtctttgggattggtggcaggcatcagtaatcccagttactcaggaggctgaggcaggggaatcacttaaaccttggaggaggaggttgcagtgagctgaggttgtgccactgcactccagcctgggagacagagcaagactccatctcaaaaaaaaaaaaaaaaaaaggtatctgaaaaggctactaaaatactgtcctctctttttcaactacgtatttttcctttgcttttttttctttttttgagatggagtcctgctctgtcgcccaggctggagtgcagtgacscaaccttggctcactgcaacctcctcctcctcccgggttcaagagattctcctgcctcagcctcccgagtagctgggactacaggtgtgtgccactacgcccggctaatttttgtatttttggtagagacgggctttcaccatgttggccaggctggtcttgaactcctgacctcaagtgatccatcggcctcagcctcccaaagtgctgggattacgggtatgagccactgctccaggcctggaggcaagaatttyttataggcttaaataaaaccaacctattgcaataatttgaatatagtaggagctatttaagtcgacattaataaagagatttgtgaaaatacaatagtgtcactcttcttccaattttttttatgtatccagaactatgatttttttttttaactacctatagaatgcttatatttttcttaaaaaataagtttaagaaccaggcatggtggtgcatgcttggagtcccagctactggagaggctgaggcaggagaatcacttgagcccaggagtttgagtctagcctgggcaacatagcaagaccctgtctctgaaaaaaaaaatagtttataaaaaataatttagccaaattgataggtggtgatgtgcttatgttttgtatacctactacactaagctatgaaaagaataatagaagtgactactactttctggaattggaaattcttggccatacattttttaaaagttataaacaactccatgtttttaaacagaatagaactccctctaaaagcagagctatctccaaaataaatattaggagtgtttttaaatgcttagagctaggttaaacagctttattcaaaacatatttaaatgttatatggtgaaatatcttctctgtcctctgaggtctttggcattatagagagattccttagtctgcttcaatgttgttcaaattcgaggtttccttaagagtctctttaggaagtaggttggtgttaggctaggcacagtggctcatgcctgtaatcccagctacttgggaggctgaggtggcgtgagaattgtttgaaccggggaggtggaggctgcagtgagccaggatcgcaccactgcactacagcctgggtgacagagcgaaactgtctcaaccaataaaagaagtaggttggtgtttatattgaaaataggaacagaaaacaaactagctatactttttaggatctaagctgagaataaattaatttttttgctttctctagctggaatggctttacttgtgtaaaatttggaaaagattattttgcaataaaatcaaacttacagaattgactcttgaattctagactaactttgaataattggacctgcagattgactatccaccatttgaaaaaaacttttacaatgagcatgaagagataaccaacctcactccacagcagttaatagatctccggcataagctcaatcttcgggtaagcatcattaagctcaatrttcttaatattaatgttaattagtccagatttagtattattggttatctaaactaataaccttgaatttcttttctaatggtctctgaactgtctttgccagagtaattattatatcccttctgttcatgtctcttaatttgattgttttagtcttctagatgctgttttaggataggatcattttcttgtttcatatttcagtcagttttatatgttctgtgctggatgggctagtgatgaagggtgggagtccccatctaaaggaagaggaaacaaaaggaatagatgttaacagatgatatcttagaatattttgaaatgaagataaacttgtctgtcaaattacatatagtatgctttattttaaaaattagaataaactaataccttttaaaaatatgcatgtactaatttcagaatggtttaaactgcctaccagaaagttttgggctgcacattggctrcattggtttaaggtgctgatagatggtaaatgaaacacacagaaaaaatatgctatgctatctactctaatatagacaactttctcgcctgtgtgcaccttatcagttgctacacgatgtttaaactcctgttttccaggaggggtgtgtatttgtgtgtgtacacttgtctgttttccaagaggttactcatctccccagtgacccaagaaaaattttaagtaaaacccctgaaatcctgattggaaatatcaacatcaccagagaagcattgaaaggttaccactttgggggacaaaatggagattataagccccattcttcacctaggtgcagtttgaacagggcttgacagtggctggaccatcactaagtgagactttaattcatcaagcataactgaaaatggaggcagtagattatatcttggtagccagcatgtgtagacttgtcttatttggagcccacttggaattttcatttcaagagtaagatacattaatttttttctaccatctggttaatacttaatgcaaaatggcaaaagaacagttatggcttcccaattcattgaacaattttttttccgttttatttgttatgagaaaattaattttgagttaagaaatttttaatcatttaaaattgtatgacaattatcttgggaatatttatcatggagtttttaatatgaggtttatatttgttaccatttgaggtttttccttttcattgtatgattttggcttacagacttgtatttttacttcatactccagctaaaatgctagatccaggtaagtattgttgaacttcaaatgctgttaatgttgaagtacaagtcattctggggagtygtctctatctctaggtctctggtgctgcacctcctagaccaggaagtagctttgctcattttgggtttgacgaacaacttatgcaccagattcggaaatctgaatacacacagcccactccaatacagtgccaggtaagtaaaacataatgaaagaaaaataaagtagggtagtctttcatgactatattaatttaaaaacaaatcacagcagtaaaacagtgtttagtgtagaaccttrttgataaggatagaggtatttatcactcttaagaagtcactaaatggctgacaaatattcttttgtatctgatacgtatgttgaaaatatgatatgaagaaaataatttattaggcctaaacctaaccaaaaaggttcgtatatagacaaatttagcactgtcaatgactagaattccttcgttcgtcacttgaaaattctcattcattactgaaagttttagcttctttttcccatttatatatgggatttatttattcttatgcagaacattctcattttctgtatatgaatgagatagtctgtaccttcttaaggggggaaaatttttaaaattttagcaacccttcattataaattgcaatttttctgttttgtttttgtttttgttttttttggggacagagtctcactctgttgtccaagctggagtgcagtggcgcgatcttggctcactgcaatctctgcctcccaggttcaagcaattctcctgcctcggcctcccaagtaggtgggattacaggcgcacgccagcacacctggctaattttttgtattttagttgagatagggtttcaccgtgttgcccaggctggtctcgagctcctgagctcagggaacctgcccacctcggcctcccaaagtgctgggattacaggcgtgagccactgcccggccttgatttttcatttctgtattttaaacaaaatggagttgtttctgttctgtaagtggtggctgatatccacgtaatgagaatgatgtcatttcctataaatcaagaagttaatgagaatgttggatattgatatttctatttcacaaccagtatgcatagcaccaggtatgttttgttccattgcaaataaaaatgttagtagtcatttatcattccccaggatttgcttcagtacatctttagaattgaaattttagagtggttatattttactttttctccagggtgtgcctgtggcattaagtggtagagacatgattggtattgccaaaacaggtagtgggaaaactgcagccttcatttggcccatgttgattcatataatggaccagaaggagttggaaccaggtgatggaccaattgcagtgattgtgtgtcctaccagggagctttgccagcaggtatgtgctttctatagaatgcctccttccatatgtggactagcaagggaccagccagtcaagtgaggtagaatgaccaggaaacttttttttttaattgtgataagatacacacaaaattgattatcttaaccatttttaatgtacagttcagtggcattaagtatattcacagtgttgtgctaccaggaaacttttggaaagtattatgtgttaaatattttctatataaccaaatacatattttcccctaaaaactactgtttttatttatttttatttatttgctttttttgagacagagtctcactcttttgcccaggctggagtgcagtggtgtgatctcagctcactgcaacctccacctcccagtttcaagcaattctcctgcctcagccgagaggctgggatcacgggcacacgccaccacacctggctaatttttttatttttagtagagacggggtttcaccatgttggccaggctggtctcaaactcctgacctcaagtgatctgcttgccttggcctcccacagtgctgggattacaggtgtgagccactgtgcccggccagaactactttttttaagaggaaaagcctattgtgatatggggattgtttgtattataagctgacagtttttctgtaggatgarttcattttatcttggtagaaaagcagtgacaggatcaggaagagaagggggtaaaatgaataaaagattttagataatctgttgagatgcaataatggtattccattcatttatacctttatgaataaaatcgtggttttaaagtatgttctaggtttcgattttttatgacatcacattctgtttttcagaacttcgtttgggttgtgacaggtatttgttagtgtcacagtttgttaatatattattcacaactttgtagatccatgcagaatgtaagcggtttggaaaagcatataatcttcgatcagtggccgtatatggaggagggagtatgtgggagcaggccaaggcccttcaggagggggcagagattgttgtgtgtaccccagtaagtatgccttgtgtttaaatggcttctcagcctccctcggtatggaaaacatgatkagttttgcagagaatttcccctaaagtgtggtaaaagcagggttgaaaatatactgatgaacggcaggctgtggttttaattttgattggtggctaaattagcagttcagtgagagtctctgtgacatataggctagtagctacaaattcccctctatgtcaaatagtttttcttatactctcccacaaaatgattgccaagttcatcaagaatcagaaagatacatatggtcagaatagcctagaagagtgtagtttaaacattgaaacctgtcattatgctttaaatcaggtcactttaraatgcctcaaaaactgcttctggccactttcccacagaatttaaatcacagtgtaaatgaagatgccgattgagttttcaaaatttctgttcctttgagctaagtagtgcataaggtatgtggctgttggaccagtatctattacagtctgagactagagaattagcacttttgccaggagtgcaactgcttaraaagtccctgtgaatgcctttaattatacttactgttcattttgttgatcttatagggtcgactgatagatcatgtgaaaaaraaagctaccaatcttcaaagagtctcttaccttgtgtttgatgaagcagatcgaatgtttgacatgggatttggtatgccttgaataccagtttcttctgtccccatcctcatgatactagttttttttccatgtctttctagactgttttttcagcatgagagaagctaaaaatactcctggatggggttagactayagaaatatagctaagatgaacatttttaggagttttctctggaaaagtatgttaggttttattgggttgaggaaatttcaaagtgcctttgtatataaggggaatattttctctgtcttcatttttatccatatgcctttgatcatagaggttaaggtctgtgttcttgggtagatgaatgtcagatcattcgaggccctttgctttcctatcctcgtagctgtctttactgattggaacactgctagacctagcccagttggatggagggaaaatttttcacttttatgctgaatgatatgtttaggagcttcttttttcttgagacagagttttgcttttgttgcccaggctgcagtgcagcggtgcgatctcactgcaacttcctccttccagtttcaagcgattcttctgccwcagcctcctgagtagttggggtgataggcacctaccccacagcctggctatttttttttttttttttttttggtatttttagtagagatagctgtgttgaccaggctgcgaactcctgacctcaagtgatcygcctgcttcggcctccgaaagtgctaggattacaggcatgagccactgtgcctggcctggggtttctaattttcttaattcttacaacttcttatgaagacttttactaatatggctttttccaggcttcccaaactgtatttcaggttataataattttattgttctgtttcttgcagagtaccaagttcgatccatagcaagtcatgttcgtcctgacaggcagagtatgtatgaagcacctttgttaaaccaaatttgtactaaaaagggcacttatttattttataagcactcagagttatggaagtaaaaatgatcttgtgtctgttggtgagaaccataataagggaggtaatgagtttatctgagctggacaggatcttagcactagatataacttgttcctttttatagatgataaaaccaaggatcagaaattaaataaactgccctaaattatacagttttatcagtgggtagaagcagtgtacagtacagatctgctgatttgaaatcaagagtctttttctgaaccatactgacaacttgtcttaactaaaaatgtaataaaaatagaataagagcaaatctttccctagtgaatcagtttctaaactaaatttaaagttcaggtgagcttatgtaaaaaaactgaataatcctgaatgccaaagaagcttaatgggtatgcataaagatatcatattgtttctctaacagaatttatcttaccttttagctctcttatttagtgcaacttttcggaagaagattgaaaagttggccagagacatcctgatcgaccctattcgagtggtgcagggagatattggagaggtaaccctaagcagggctggatgggaccttaatgggtttatttctcatattatggaacacagaattaatttctcactattgagataaaaaaaaaagatgttatgtttatagatgcaacatgcttgagattgggtattttgcaagttgtggggatagacgwaacaagactggcaaaatgttgggaatcattgaagctaggtgatgggtatgagttgattttgttcattttgtgttttttttgttttattgaatgtctcaaaacttacaattgttttaaaaaggcttcaaagagacaaaaagatgtgcctggaagcatcagcgtattaggttggaactgacgttttaattattgtggtaggggcctacgcaggagggaaagggtgacctggaaggcctggaaaaaatcaggtttcatttcttacctgtacatatgcgctatgtgaaaaattactctgaattgggacttggaattcagttatggctgcttagagaatccttcagttgcttgccatggttattgttaaggaaagctctacaaagtagtggggcatacaaattaggtatgtacaccaggtggagagcaaggtgattggaaaggagaggtgagttttgagctgcacttgacttgctgaaggcccaaggagaactgggattgttcaaggtcttctcgatgcaggtagaaatataatgcctagtccttgttcaggtgccctgtggctccaatgtcacaatcatctgtttcatttcttccttctcaggcaaatgaagatgtgacacagattgtggagattctccattctggacctagtaaatggaactggcttacccggcgtctggtagaatttacctcttcagggagtgtcctcctctttgttactaaaaaagccaatgctgaagagctagcgaataaccttaaacaggagggtcataatcttgggctgctccatggggatatggatcagagtgagagaaacaaggtcatttcagactttaagaaaaaggacatcccagtcctggtggccacagatgttgcaggtagagtatgaatttttcaacaacattaagttcctaggctataagggtactctgtcttactacataagacctataatatctgagcaggctgatggaaagactgttggcctggctggccatcccctcccaaacccccaaggaagcagcagttcagcacagggatcacagtctggagctctagataccacttttcacttagtatttctctctaatcaaagaatccctgcagctagaagtcactctgggaaaaaaggcagtgaatgcccttattgtatgtctgaatatagtagataccttacccttacattgatctactatacacagcttagttgggcaacttaactcaggatgagaacagtttttggaatataatttctggatttgttctgtcaagttttaataactacccttaaacactgatattttttcctagaaaggagagaacttctcagcttcatgacacattttaaatatatattcccagtgcaagagaagagggcatggcagattactgatgcaaaagataaaagtcccagtcgggcacggtggctcacacctgtaatcccagcattttgggaggtggaggcgggcggatcacctgaggtcaggagatcgagaccatcctggccaacatagtgaaaccccgtctctactaaaaatacaaaaattagctgggtgtggtggcgcgtgcctataatcccagctacttggaaagctgaggcaggagaattgcttgaaccagggagtcggaggttgcagtgagccgagatcatggcactgcactcccgtctggcaacagagcaagactccgtctctaaaaaataaaagtcccttacactagaaggcctaacatcatagaatctgtggtggtgacttaacatgcctgtatctcagctcaccaaacccatgcgctttgcctagataaaggaaatgtggcttattagcactagcatttctggttactttgatcttctgactacagatgaagaataaaagaatttggttgctttttatttcagcccgtggtctggacattccttcaattaagactgtcattaactatgatgtggcacgagacattgatacccacacgcataggattggccgcacaggaagagcgggtgagaaaggtgtggcctataccctactcactcccaaggacagcaattttgctggtgacctggtccggaacttggaaggagccaatcaacacgtttctaaggaactcctagatctggcaatgcaggtgaggggctgggcacactttcaattgctcctggttataagaccaagacattttagcagtcctggaacagataacataaaaacttgacaagaaagttgggtggctaggaggatgtggggcttatgaggtacagataggaattgtgagatactaaaattcatctagtcttatctggtcttcttctttcaacagcatctgttttgaaaagctattcctttgtgctaaaatctgtcgctgtaatttctaccccatagcacacttaggagtaaatttaatctcaaagatggttactattctccttactgctcttcccccacaaaatttttcttctgggaggctaaaaatgtgtgatgcctttaaaacaatatgtgtatagtatagtgcccccccaccttttttttttgagacagaatctcactctatcgcccaggctgcagtgcaatggcacgatctcggctcactgcaacctctgcctcctgggttcaagcaattctcctgccttagcctcccaagcagttgtgattacaggcgcccaccaccacgcctggccaatttttgtaattttagtagagatggggttttgccatgttggtcgggctggtctcgaactcctgacctcaggtgatccgcccgcctcggcctcaacctcccaaagtgctaggattacaggcgtgagccaccgtgcccagcctgtatggtgcctcttaactgttccttgcagagatctcagacctctgaccacactgattgccctcttccaggtgtgctccaatctaaagctaagtgaggcattctaacaaatcaaacctggagtcatctgaatccatgctgtccccaaattacaaatgggttcggaacactttctgagagcagaaactgttaagagtttgtcaaatgcytaggccagctcacacaactggtacaacccagctgcaatgtggcagtgcccaagtttctggtcctaggagtaaaggacctgcactgcaggagagaagagaataatgtttcctcccctgctcctgagcacagagagctagtcytaaataaacttttaaaacaggacacattttgactttggcattttcttccatttctttttgtacctcaggctttctgtgctcaggactttgtccaagcctgctgccctacctctcaagcactttattttgctggtaatatgtgattgtcagataaaactttaaccttcccagagacatttgctttttttttttttttttttttttcttttttctgagatggagtcacactctatcacycaggctggagtgcagtggcgcagtctcagctcactgcaacctctgcgtctccggttcaaacagttctcctgcctcagcctcccaagcagctgggattagaggcatgtgccaccatgcctggctaatttttgtatttttagtarggacggggtttcaccatgttggtcaggctggtcttgactcctggcctcaagtgatccgcccacctcggcctccagagtgctgggattcataggcgtgagccaccgccctgcattcttaagagaatgtgagtaaatatgttgagtggcaatggtcaagttcaatgaaaacttttacgctctgcgggtaaataaaattttcagttgtgtggctaccatcctttctgggagtctgtccctatagtcagttctgataagcctcacttcacatagcatttttcctttgcttctgaacataccagttgtttaagttccaaatgtttacgtccaataatacatggtttgagaaataaaatataagctcattttcctcaaggaagttagaagtagccaaagttactcctctgggtttgaagcttacctgaacaacttcccttccaggagagccttgagggagggagcactgtaggaagccttagataaggatctcagccacttttcaaatttggtggattatgctaccaaagagaaaccaatctgtggttcctgtgaaaattcctcccttagcgtagtgctggctgaaaattaagcaaaagttcccccttcccacttaatttcctctttgtcctcnttctcttcttctgttcttttctccctcccttgacttaaccttgaattttgttcaatgcagaatgcctggtttcggaaatctcgattcaaaggagggaaaggaaaaaagctgaacattggtggaggaggcctaggctacagggagcggcctggcctgggctctgagaacatggtgagtctagactactacagtagtgcctttatagttggtctcatgtcctgaaagtcattaggaatattctcatctacccaggaaagcctcagtgagtttaaagccctgtctagaagggaatttgtatttaatctgatttgagtcaatgcagtgctcattcttatggtaactttctattgaagaagcatctttgtgtacttggttgactaggcttgctcaggaaattattctagattagcagtgatctcacactgtggtccctggaccagcagcacatgcaaactcatccccaaccccagaccttgtgaatcagaaactctggagttggggcccagcagtctggttttataagcccttcaacactggcctaaagcctgctgctaggtaaatgttgccaaagggtcactgtaaagtctagccatatcttgtcattaaactcaggaacggatcaggaatttccaagtcgggagctagtttttctcacaaaccaggtaacaaatgtacccttttggtggcctttcttaactgcctgttttctgtcaccttgattccaagccagggaagaaagctgccagtatacttttctggagcattaaacttggcatctttgtaattacatactctgttcccacattataataataatgatgatgatgcataataataggtaatatttattgagcactttatatgtgccaggaccattccaagcartcagatgttttggctcagttaatcttcaaaataactgaatggaagttagtacagataacaatgctgaggcacctaaggttacagtgacaagtgttcaagccgaaattcagacccttcatggtcttgattcagggcctgagcagtcacacaatatgctattcagggccttttcatctttaacgtaatttttacttaattaattggaagtgtttatgtaaatacatgatcaactttgggcataatctgattgcatttctgtttaatagggttaatttccagaaatagaatttctgggttgagggcataagcatttttaaatgattgtcacygtgtcttttctcacaaagcagtagcagctttctaaaagtatccagttcctttgtagctcccacttcaagggttttcataatgaggcctagtctatagcagtgagctttcctgcttattttttcattctcatagatgtgtttatttttttaggatcgaggaaataacaatgtratgagcaattatgaggcctacaagccttccacaggagctatgggagatcgactaacggcaatgaaagcagctttccaggtctgaaataagcatttcattaaaagcactttcagcartaactcttgggcagtgacagaggggcttagttttcctggttgtagctgggcgcctaggcttgatgctagatttagggtcttcacgctgcttggattttgaatataaacctaacagtagcttagttggaaatgcaagttgatctagagaaccccttgtgctggtctactttgagtcacacttggggcctgggattgttgtcctgcagcagggtgygtgttccctcccttcccaacagcctgaagtgttgcccacctcccaggcacccacctccaactcacttytgaagcaaaatttactgatagtcacactaaggtgaatcgatagaatgagttcaaggcaggttttgctgtcaaacttaaattkcagtatgaaawttttttttaagttttcagaactttttggttttgaatgcagataaatgtgctaaatacatagatgctttattctagccaatcaggctataaaagtacatttcagaacactgggggtccatctctccacagagatccacaagttttcctttatagcacaagaacaaaagggaccatactgtggggccatcaggacactaaactcacagtgccaggatagcacagagtttctgtaaacctcatcmtttgccaagttgtatattcaagtttcttgaacttgctatcttacctactcctgatgtctctttctctttcagtcacagtacaagagtcactttgttgcagccagtttaagtaatcagaaggctggaagttctgctgctggggcaagtgggtggactagtgcagggagcttgaattctgttccaactaactcagcacaacagggccataacagtcctgacagccccgtcaccagtgccgccaagggcatcccaggctttggcaatactggcaacatcagtggtgcccctgtgacctacccgtctgccggagcccaaggagtcaacaacacagcttcagggaataacagccgagaagggactgggggcagcaacgggaaaagagagagatatactgagaaccggggcagcagccgtcacagtcacggagagactggcaatcggcatagcgatagtccacgtcacggagatggtggtcgccatggagatggataccgccatccagaaagcagcagccgtcatactgatggccatcggcacggggagaacagacatggaggaagcgcaggccggcatggggagaaccggggtgcaaatgatggtcggaatggggaaagcaggaaagaagcttttaatcgtgagagcaagatggagcccaagatggaacccaaagtggacagcagcaagatggacaaggtggacagcaagacagataagacagctgacggctttgctgtcccagagccgcctaaacgcaagaaaagtcgatgggacagttagaggggatgtgctaaagcgtgaaatcagttgtccttaatttttagaaagattttggtaactaggtgtctcagggctgggttggggtccaaagtgtaaggaccccctgcccttagtggagagctggagcttggagacattaccccttcatcagaaggaattttcggatgttttcttgggaagctgttttggtccttggaagcagtgagagctgggaagcttcttttggctctaggtgagttgtcatgygggtaagttgaggttatcttgggataaagggtcttctagggcacaaaactcactctaggtttatattgtatgtagcttatattttttactaaggtgtcaccttataagcatctataaattgasttctttttcttagttgtatggccaggcagtccccattttaggagttggcttctgcaaattcaatccattgagctaactgttggggagcaatttggtagttgtagacatttgcagggaagggagatgtctgattctaaatgggagttgatgctcaggtccccagccaggtttgcatccagccctgagacatgtaggaaacacctttcagacccaggctctgaagattcccagaagccacaaggattgaagggaaaaggtgatcctggtaactgttccaggattgctccaggtttgagatggtattgctaaatttaaaattaaacaagaracccaacaacagcttttaaagtgtcttctatytcattgtattttttttaacttgccccaatgatagaaaagtcttttgctgaaatgattttgatgatttttgtttatcgtttataaaaaggaaaagaaatatacaaactttgacttttgtgactttgtgaaggtttctttaagatgtgcattcctttctgcttgctctctagtaaatgttttactaccgggacctgtggatcgtttgtcatttctgtctatgaattggtacatattaagaatagtgccgcacacagtgtagggacagatagggaagtgcttattaaaactgtcagaaaagacaactcttccattatcctggttttattyaggaataggatgggggtggggagggcttaagtggcccacacgtccaggtgtagactgactacattgagtatcgctccaacaccgaacttccctttaacggtttaaaaaaagggtcatgagtgtcaacacagttcagcagtgttttcatgggagaccttcaggcaggcaggaggacatcctcctctctgctcaggaccaccacgggagttctaggcactccacctcactgttcttcagacagctgtgatgtgagcaggggctaggccggtaatcaagggggccagactgagccatgccacacccttcctcctagtccccatgctctcctgggagcctggcagctctgcttacttccgtttgtgttttttcttttgttccttacgttgctgtgctctttggtccttcttcatccttgagtccaccaccttgaaatgacctctgactccagctggccggcgcactttgcggcccacaccttttttggctacaacgtaggtgacatggcgtttctccttgccaagcccagccttcttgtagagactacaggggggaagagaagaggttagaggcttgctttctgctgcacttttagccctgtgtacctttgtggtgtcctcccattaccttcgcagctgtgccactttctctcgttctgagatgtccactgtgttcaccacggcttctgccttcttcctggtctgctccagcctcttcagcatctgcaaaggaacctgtcaggtgacctcttccccatccccccacccccaccccacccaatctctggaggccccatcacttaccctccttttctttctagccttagcctcagccaccttcttgatgggacgtgcattgatttcccgccagcgtttccggtaatgctccacctccttcttaccaacaggcaactgtcgtatccggtgctgcttttcctcttgcacaaaccactccggaagctccccctcatcctcattaaatgtgtacctgagtrgaaaggacatctgtctaatatccaacattccaggctttctaaagaaattaccagactgggcacggtggctcacgcctgtaatccctgcactttgggaggctgaggtgggcagatcacctgaggtcaggagtttgaccagcctggccaacatggtgaaaccccatctctactaaaaatacaaaaattagctgggcgtggtggttggcacctgtaatcccagctactcagaaggctgactcaagcgattcaaggagaatcaggctgcagtgagccaagatcgtgccattgcactccagcctgggcaacagagcgagactccatctcaaaaacaaaaaattacccatttacccaccagaccctgggtcactcttgatgagtttatggcccctttaccggttgaaggagttatctatgaggtctctcttggcctttttggaagaggcaataacagcacctagagcaaggccttcggggtccagtatccgatgtttcgctagagagggaaggagaaaggtcaaagctcaattcccaatactgagacttccagtggtcttttctcattccactgcatacagagctctcacctgggtcctcaataggcactatctcaaacccgtcatcatctgacttaggcccacggcttcgcttcttaccacggaggggttcccagctgtgaagaggggaggactctgagtgattccaccactctgtactactcagaccgcactcccacggaatttgcaaaaatcctgccatgcaggctgtaccccagaccagttaaatcaggatcgtcagtacagtatttttaaccctccccatgtgcagccaagattaagaacccccaatttagagaaatggttcaagccaccgcttcctttccatcccttctctcagctgcaactactcacctctyttcttcytcactgctagtactgctatcactgtctgagatgccatccttttcttccccttcaaggccagtggcagcttctgtccccgaaraagcctctgttcccttaggggcttcatcttggtacaggggagacattatctcagtcttcaaacaggaagggggtgtctgtggcagctgctgcttctgctgctgctgccgtcccttccgccggttctcaaataacagctgggcctgactgatctccagggcctcatcggcatcgtcctcgatcccagcaaagctgccctgtgataggagaacatcagctgcccttctcccaaggaagactcatctccccgcagtcttgcccccggcctctccttacctttgagaaccacaggttggcttgttcttcctgcagtactgccttttcctccagtggtaccagcagtggattctcctcctcctcctcctctttatcatcttgcacttcagtaagtcgcatactgtagacccaaaggaaagtagggggctcagagacccagattgcctggagcccttgctgccctactcaggctctggtagtacccaccctaacacttcctcagagtggcagcattccctttggtgcacacgtgccccttaccgcttttggtcccttagaccctgatgtcccctgactcctgccagctcctctggatccaggtcactatccagagatgtgtcatcaccgtcgtcctcaacatctgacacayagatatcatcccttggcagatcggacagaaatgtgtctgctgcactcatatccccttgtgttacttcctctaataactgaagtgtaacagaaacaaaggtaaactatttaaaaggaaatatactgtttttttttctgtgtccctcacctcagtctatgctcagcaacactagaaagaacactggcaaatccattatcctttcacagatgggaaagctcagatccagggtagtgaatggcctgtttacaacatcccgttctaggctgggttactgatctatcccactcagctgtcttgtctcagtggtatcacaaataggtcttaaggaaggtacctacagcccacatagcaccaaatcttaacatattctacaacactggttttcctttaaaaattattctcagacagcatctcaatcatctcctgagaataccgtctacacagtttgtttccactgaataaaaggggcccagccaacatacatccaacaaaactgttccacttaaaccaattgtcagaaccttttattttcctcatggtaaagatactaggctgggtatggtggctcacacctgtaatctcagcattttgggaggctgaggcaggaggattgcttgatgccaggagtttgaggctgcagtgagtcatgatggcaccactgaactccagcctgggtgacaaaacaagatcttgtctcaaaggaaaaactccaactactatttcttgagtgtttatcacatatgagggattacacctatctttttttattcctcaccaaaaactctagtaggtaggttctattattgttttacagatgaggaaactgaggcagcaaggataagtggtagtcagctcagtcacttcacaaagctccaggtggtagagctgggaaggaaacctgagcctgtgtctgctctagggccaccatgctctactgccctcctgtacaacaaagatgacctgattatgacactcccacacataagccacaaaagttcattttgtttgtgaccctgattttgtcaggaaaaacatgttcttcagtattcagtggaagtaccctaatgcgagtgctcacttggtctcaatgaactaaagaatgctgctcccctctgagggagatcctctattcatctgtgcttgaaactcaagtaacctggcagcatctactataacctaagttcttttctgatgttctagttcttcaagaataaatctatcagccgggcgcggtggctcacgcctgtaatcccagcactttgggaggccgaggtgggcagatcacgaggtcaggaggtcgagaccatcctggctaacacggtgaaaccccgtctctactaaaaatacaaaaaattagccaggcgtggtggtaggcgcctgttgtcccagctactcgggaggctgaggcaggagaatggtgtgaacctggaaggtggagcttgcagtgggccgagatcgtgccactgcactccagcctgggcaacagagcaagactccgtctcaaaaaaaaaaaaaataaatctatcacactcatctatctacctaactcatcctttttggtttatgtttctttgtggccttatactcaccaaggcaccctgtggtgaagacagcaaccacagcctatcgttcggcaacctaaaaagacattcaacaccccccacctccaaacacccaaacagatccttctgtctcctaaacctgcacccccaatgccgcctcacctggtgaccccggatggtgcwcaaggagaacatgccagtctccccctcgtctgcaatggaaaccccaggcagatccatcttcagctccacacgctcccgctgctttctctgctcacgcaacagcttctttttcttcctgagggggtggattgagggagtaaaaccggcccagctccaaagtttctatccatgccttgcattttcttctcccatcttcacacagtccctgcgttggggaactccaagctctaccccagctcctttcacctcttcaattccgccacctcctgggccttcatttctgccaaggtctggttcagttgttcctcctcctcctcttcctcctcctccttagagggctgctttgtggttccagctgttgagtcctcctcatcaccttcatcttcctctccagagctgaggctggcaaaacagtcccaagagttgggttattttcccagactyttcccctggacacccggtccacacctgcctcgctgcgttctctcctcacctgatgtccagtgcctttgcttgttctttcagcttcttggccacatatcgccgaagttttgttctccagtttagtagcgacctgccccagagatactattactgatcttgccatctccctctttgtccccgcccccttctgttttaggctcactacccacctttcgggcttcggctacataaatcaaaaggctcaggcccccatcccaaacctttagcacagcaatatcctcttcccagaggtccaacatcatggcctttccctgcctccagggctcctggcccccgtgcctaccccactccatacctgagctccttgcgycccaacactctgatgtcctgacagcacacccgtatgtcctcagtggtagctggatgctgtgccaactcttcatcatctaccatgatctgtttgggaggatggaaaggtgtcaggggagatcctcaggccatgtttctggggctacctcatgtccctcaaggctggagactcacttcgctggccttggagaggaagtcaacagggttggcagctcggaggaartcagtgactgaggtacggtgatagagagtgaggtcaccctcagcatagccttcagccttaggaaggaaaagagagaagcttggtcaggcccttctaaggtacctgtaggacccaccaggcccaacctccctagagttccaggacccaagagtgaccccattccccaaaacacacctttggcttcttcttagtaaccaattcagtaacggtcttagcctgaacttcaacctccttaaaggcaaatttggggtcaaagaatttactgtcaaccttgtcaggggccaggaatcctaaaaatgacaggatatattaaaaagtgtgctttgggagttgggagcctggatcaagagaaaggaaatgatgcccaccttggcagactacaaagatctctgcagattcatggcgagaggcttggggcttggtggcctggacacggcggaacagctgctgaaagatccatagcagaggctgatagtcacgagaacggaaaacctttgtgatgaagctgccaccacgggccaaaaagtcacaagccaaacgtagagccatcagtgtcaaatgggctgtaggatagagacaattagttgacgcactctgcagcccaggagggcatgcgcccacctccaccatcacctgatctccaagcaccacactccctgtaccttgtgagtaagcatcatggacccagctagccccaacgttgggggccccatcattgagcacaacatcaaccttccaggtcttcagctccttcctcagggcctaaagagaagaaaaggaactatg

SEQ ID NO: 96106 - DNA, 28105 bp, Homo sapiens
ctgccctctctgatggcctgttggcactcctcctgcctatctctgcacactcagcgactttcccctttgatggggacaggagtggaggagggcagggcaggatggagacaccatacacattcctgctcagtgcctttgccctccctcttccatccatgggagtcacctcccctagaccttcatgtggcctgcgcccccacttctccctcccagagccttcctagtgcccccaacaagtgcctgccctcgcctgacgccctgtttgtccccttctgcctcttcttcatgctgcttgttaggttgaaacataacatctgtgtttcaaaacacatgcagtcaggtttctgtgcatgtgtgtatgtagatatagattgtggtgcaatctcagctcactgcaacctcctcctcttgggttcaagcaattctcgtgcttcagcctctcgagtagctaggactacaggcatgcaccaccacgcctggctaatttttgtttttctttttgtattttttttagtggagatgggtttcgccatgttggccaggctggtctggaactcctggcctcaagtgatcagcctgccttggcttgccaaagttctgggattacaggtgtgagccaccgcacccagacgttagtttactttttaattccctgtctacccacttcttgtaagttacatgaaagcagacaccttgtgtgtctgatctgttactgtctctccagggcctaggataagcaggtgccagtaagcctttgttggaagaaaggaaggagagaaaatggacctcctctggatgggatccttggctcctgcgtgctgatgtgcagcctgtgacccgggctctgcactgctcctctggctccaggcaatcatcatggaaagggcggcctccccagagggctgcctgggaatgaactgggcatctggggaagcccattcctttggctgcctcttgcctgtggcgcccagggctgccgtgccacctcctttgtgaagctggtccccagccctgcttatcagccccatgtcccattcccttgggcccagcagaggtaaaagtggctaagtggcttaactgggccaggtgcagtggctcacgccggtaatcccagcactttgggaggccaaggcgggtggatcacctgaggtcgggagttcgagaccagcctgaccaacatggagaaaccccgtctctactaaaaatacaaaattagccaggcgtggtggtgcattcctgtaatcccagctacttgggaggctgaggcaggaggatcacttgaaccacggaggcggcggttgcagtgagctgtcattgcactccagcctggacaaggagagcgaaactccgtcttaaaaaaaaaaaaaaggtggcttaactgtcctctctgtcatggcctctccctccctcttgccccagtggtatttggctcttttgtctgtcttgtttttcccagactgaccagccttggggttaaccaggggcagggtgacaactcacaggcaatgacgtccctcagcctccttccccccacactccagaggctgcaggtgactcagggtcttcgtcggtggctccggaagccttgcaggtgccctgccacatggccgctgtgctgctggctgctctgacgggtcctgccggggctactgctttcctgtcccctcccccgaagctgggagatggatttcctccctgagtgattaattggtctattttaagctcatcaaagtagcctcgtactttcaagttcctcagggagcaggcccggaagatgatacctgcggacttaaggctgctccactgcaggatatggggtcgggggctgtgtctgtcaattgtgaggtccctcagggcaggccccctcctgagctggacagggcttggctcctgagtgctgattctgcaggctgtggctcagttctgcactattactctggctccggcaaatcctcatgaaaataagcctgggagccccgagggttgcaggttagccccctacagccttcccttgcatcatccttgctcctctaaccagggacactcctgcctcctccctgactatctctgccgggttaacacctgagcatcttctggctcgataattctgtcatgacccaatacgccttccctgaccctcacatctgggttgagggccttcctatgccctgtacctaatcctggttttccctctgtaaggtggtcagagatgggcttgggcagagtagtttcaaaggctctccccaaatctctgtgcagctcccctgactgaaggcctgtgagaacagggtggtgcctgtcttgttcactgttccccaatacctcacctagtgcctggcacagagaaggtacaaaaataaaactttcccaagaatgaatggtgtgcatttgaatcttatagtgtctgaggactggggaaccatctcttatccctttgtatcctctgctgcccaaggtcagggcctctgcctgaagtccctactgaatgagggttaactggttcagagatgagggaggaagccattgctgggaggggctagaactgggcccctgcccttcccacacccgagcaagagcagtaggattgtcagatgaaacacaggacatctgctcacatgtgaggaatacatcttttttttaagacagattctctctctgtcaccccaggctggagtgcagtggcatgatcttggctcatttcaacctctacctcttgggttcatgccattctcctgtcgtagcctccccagtagctgggattacaggcatccaccaccatgcctggctaattgttgtgtttttagtagagacagggttttgcctcattggcaggctggtcttggactcctgacctcaagtgatccgctcacctcagcctcccaaagtgctgggattacaggcatgagccatggcacccagctggaatacatctttagtatactgcatgtaatatttgggacatgctcatgctgaaaaaactaactgaatttgaatttttttttggttttctttttttgagatggagtctcactccattgcccaggctggagtgcagtggcacaatcttggctcactgcaacctccgcctcctgggttcaagcaattctcctgtctcagcctcccaagtagctgggattacaggtgcctgccaccttgcccagctaatttttgtatttttagtagagacggggtttcaccttgttggtcaggctggtctcgaactcttgacctcaggtgatccacccacctcggcatcccaaagtgctgggattacaggtgtgagccaccgcacccggcctgaatttgaatttaactgggaagcctttttttattttttcctcttctttctgaatctggtaaccctagcaagggagaagtgactagccaggtgccaggtgggtctacggcctgagtctccagctctctattcacattctgcctgcttccttgatgcttcctcctccttaaatgctttctgtcagagaccagggggcactctaggcctggctgcccagcacgcggaatccaggagcactcctacctcctaatccctgccccagctgccctctggatggtcagggaaggcctgaggaggtgatgtttgagctgagatttgagagaatgtgaccagagatgatccaggaaagaacattccatggagaggtgggagtgaacttggtgcatctgaaaacagaaaggctagcgtggttctgcgatgtgggaagggagtggaaacatggaaacacagtcagcatttccttttttttttttttttttttttgagacggagttttgctcttgttgtccaggctggagtgtaatggcgcggtcttggctcaccacaacctctgcctcctgggttcaagtgattctcttgcctcagcctccggagtagctgggattacaggcatgtgccaccccgcccggctaattttgtatttttagtagagatggggtttctccacgttggtcaggctggtctctagctcccgatctcaggtgatccgcccgcctcggcctcccaaagtgctgggattacaggcgttagcacaactcaggaggccctggaactcatcttgtgccactcaagaaagggcaggaggggtcctctcctttcccacctttcccaagctgaaggactgcacacttctcaggcttccaaggcaggagcttcggcagcaggaacagggttgcaaggtagttagtctgggtgtctgtcgtcctgggttgggacatctgggagctggggcaaggcctctgggccctagtgccagagagcagtttggtggcgttgcctgttctttaaaatgggttaggtgtagccatgagcccccccatgcagcgggtgtgcaggcctctccctcagtcagaacaccctcacccacccctccccacttgaagcaggcccttgagaacactgctggcagggaggcggctgctcttcctcctaagggaaaagcctgcagccccgtgctgctgggccgtggggtgagggggaagccaaagggcccctatcacccctcagcaggagtctctcctggctttggaaggggctgaaggcccggggctctcacgagggaactcagccctgctcagccggtcaggactcctcctccacgtctaaatccacagaccaaacaaaggacatggctcagttccaccttcaatccacagggattctgcctgttagcacgctaaggaaactgtttcttactttaaattatccattaatttcctccaactgaaagatactctacaaattttctgttgttggagggtttaagcttggtccctctgagggggtgggccctgctgtgtcggccccttgtgtctgctcgtggaaggtgtgccatgtgccaccgtgtgccatatgcagctgacacgcctgtgcgtctcgcctggcgctggagactgctctctgtgtactaagcgagtactggatccccagggcctatcttgcccactgcctgtggcaatacacaggcaatacacaaagcgcattcaagtaagcaggtctccctgccccccggcctcccagaacctcggtgcctggagggcaggtgggggagggcgttcctgaatggaggccggtttccctctgcggggaggaaaccccatttccctcctacccctaggcgcttgctacatctggcccggcatcagacaggaaagaaccctttcttcccagcttgtaggaagtctgagctgggccccttatctacccacagcacttcctggaccgggggcctggaccgggctccgaaggggctggctcccggtcttggtcttggcctcggcgccctcgtttctctgcgctttgggcaggggaagctgcggacggcaagctctcggctttcgtgagagcctggtggaatcggtgttccccgaaggctactctgcgggggcgggggctagtccgggccttcccggcagtatcgtctcccccgtgggggctggggaggtgcccccagggctcccggagcggcggcgtggccaaggcccgaaccgggtctgacatctagtggcctcctgggcccgggcagggcgagggcggggcagggaagaaggtggagggcagaatgggaggcgtggagcgagaaaatcaggaagcgcgggaccaagccggggaagggcggcgggtctcgcccctggcacccgctctcctcggggcccgtcccatcccccaggcctggccgaccccaggtccttccgtgcgcagtcggggctcgcaaggacgaatcccgcggccctcgaggcaggcccgggggagctcccggccctccacccccgcaggccgcagatcccacgcacccccgatcatgggggccccggagggaggtcgcgaggccgggctcacggtggccgcggttcgcccacgtgcgggcccggagctggcagggcccggtcccgagcgtggccgcaaccgcggggacctggcacgtgcggggcagccccgggggccgcgtacgccacttccggtcccggagacaccgcccagcccgccgcccggttgccatggcgacgccgtcgcgccacggcccgcagaaccggccaagcgacccgggcgcggcgcggggaggctgaagggacgctcgggtaggcaaggtaggaggccgggctgggggtgggagcggagcgcgcaggggtgcggggcgggggcggcccaggtgagccctgactgcgcagggagggacagcgcggggctcccgagtagcagccggcctcgcacctgccccttgcggccgcgcactggactgcggcgccgacccgcaccctgggcccgagggctgcagggctcgcccgccctctcggagccgagcctctcccggtccaggcggcccctgccctggcctgcccgggtgccgggtctctgctgaagttagaaccgagacccccgcttgctggtgaccccgagtttggatctttgctcctgcgccgcgttctagagcaaggtagggtgcaaatggaccaaccagcctttgccacggctgccctcttgaaatctgaaaccggagccaccgcctcttgccccgagcagggcccgggctgcaacgtggagccgcaggtccccgcctgtgtctcccgacgcccccagcttctgagcgcgagggtgggagtttcccgagtgggaaagccccatggcttcggtggcctcggtggccctgtggtgggtcaggccggtgccaactgcgctgagggcggagctsccgccaccttgacacctgggagatggcagggccaccctccctccctccctccctgccctgtccccgactgtatcacggagcgaggatcatccgtgtggatctggggtccccttcccagacttctcctttctggtcgtcctcctctcattcattccaccttggcagcctttgtggattttctgactccgtaaatgaagttacatctagggcgcctagattctgcccctttggtttaatagctaatgaaaaaaaaaaaaaaaaagctttgccacctcctctaggtgcctggatttctcccggtgaaatttgatggaggcaggaaaatacgaggcggtggcagccccacctccttgcatgagggagcctcctagagctggaggtggaaccaccctgcttgtcccactccttttctttcttgctttattgctttcttgctttccttactttccttccttcttttttttttgagatggagtcttgctctgttgccaggaggctggagtgcagagggcaatatcagctcactgcaacctccatcttccgggttcaagcgattctcctgttccagcctccctagtagctgggattacaggtgtgtgccacaacacgcagctaatttttgcatttttaggagagacggggtttcaccatgttggccaggctggtctcgaactcctaacctcaagtgatctgcccgccttggcatcccaaagtgctaggattacagacgtgagccaccgtgcccagccttgtcctactacttttctgccctcaccacttttccttggcaggcagagcttgggctcctgctaatactgggatggttcagtggcattagatggcattggtggaggggaatgagaaattaaccccctctgaaagcgtagcttcactgggaaaaagcactctactgtctgaacaattcataaatgaattttgggaatatacaatgtcacagattaaaagcagaccatcctgtgttcttccagccccaggagcttctgcttggtgtgcaggggctaatggtggacagcaatggagtgtagatttattagagacggctgccatctggctctctgtggccccaaacctcatgtgtcagcagtgtgactctttctaaggtgctcttaggaccagatttcgtttttgtaagattggtctttgatggaatgcctactttgtggcaggcactgtgctgggcgctggcacacctttatccacttactccttctgtgttcaataaggtagctccagatatcctccactttatagattaggaagcaggcttggagaagggacttggcttgtccaggagctgatggttataaataatgagtctgttttgaaatcacatctctctaacctgggctgcgctgggcctttcatgggccgttggccctctggccttcacgggccccgtcttccataaaaaaaataataacaattggcccggcgcagtggtgaaagcgcgtctctacaaaagatacaaaaaattagccaggcatcgtggagcacgcctgtaatcccagactcggggagtctgaggcaggagaattgcttggacccggaaggcagaggttgcggtgacccgagatcttgccattgcactccagcctcaaaaaaaaaaaaattaataaaaattatattttacaactgcattggtataaatacaagtatagtccagactggattacaattaattttaaaaacaaaacattttagggctggctcatgtctgtctgtaatcccagagctttgggaggctggggcaggaggactgcttgagaccaggagtttgagactagcctgcacaacatagtgagaccctatctctccaaaaaaagaaaaaattaactgggcatttcagcatagctgtagttccagctacttgagaggctgaggtgggaggatccctcgagcccaggagttcgaggctgctgtgagctatgatcatgccatcgtattccagcctgggtgacagaggtagacactgttaacaacaacaacaaaaaaattaattaaaataagttttaaaaaattgcaacattttcctcaaccctaaatgttcatttttttcttctgattttcatggaaatggaaacattttggtttgtaagcattgggagccctctgtcttgtgggagaaaggagctcagtgtttgacttcaggctctgctgcttcctgggtacctagttccttggtacctggtccaagcagcctggataccccgggtccctgggctgcctgggccaggacagccgccctaggataaatggaaatgcagcccctgcggcttgttcaccctcctgtaatgccttctctcttaccctttggtcagggcctggtgtctctgcatgcaccagggcttagtgccatgctggtacaagcgtggggaggatgcaggaggactggcatgggatggggagcactgcctgggaagccccttcttcctggggctactggggtgctaagaaagtaccctaatagctcacaccacactttgctttctccttcatcacatgctaggacgctctagggcaattgagctgttttccccttcacccatcaagaagagatrtcggcctttccgcagtcacagtctttcctaactcaattcaaactctgctgttgataaggagggctgtagccagcccaggctgcccgcttcccagcctcccctgctccgccttccgcccccgaggctgtgcaccatgtgcagtgtctggtccccartaatgagattagtcttggttgccttttaataaaacgcagtgggcaycgggagggagagcgatgcttggctcagtgaagatctgcgggtcatgctgtccctaatgcgctgattgcattaagtggattctggctgcaggtagggtgagtgggtggggacgagggtgactctcacagctctaagatccagaaactgccagagatctgtcaccctcatcctgagctgtcacagaggaaggcaagtgactgtgtgaggggctacgtgagctccctctggttgcaaggttctggtctgcagggcagtggagcccttgggggtggggagtggcagcttccaggccttgaagctgctgcccacagttctgctctgagaacacagagggcccaagaacagccggtgtcccagggctgcccagtgaggagggaagagcgagagagtattcttgctgtcaagactgggaaatgagggccacgattcaaagccttgcttcctagggagaaatctcacccaatgtccaggtttgcaaatgcagcagacacatttgtgggtgggtcagattctgtccagagataccagaatgtctatccctgtacacccccacctctggcatgggacagcccttccctgcacacaaatgggttatcaattatgtccaatgaatggcctcacgagagtcctgttgcggaagggatcttccgcttatctcctgtaaagcacagagccacgctcagaacctacggactgtggtcgcctgcaggccagccatgggctttcctttcatccttacacttagattttgaagcctcgcctttgaatcagaagcaggctgctgtcattccagaggccgctgttcatctctggcttcctcccagatgcccaggtgccccgggtgcctgggctgcctaggccagggcacccgccttaggagcaaatggaaatgcatcttcctcggcttgtttgccctcctgtaaccccttccctcttgccttcggtcagggcctgctgtcttgcacgcaccagtgcttagtgccatggtggaaccgaggcggggaggacgcaggaggactggcacaggagggggggcaccgcccgggagcttcccctgcgtcaaagcagcttcctcagtgagctccaacacagacccttgctggcctcagtctctggaaagactgacagcaccaccctagttcctgggccttggaaaggccaaagccacgagcaggcagccactgttcggcaggagagctagagatgctattgcccacagacatcaaagcaggggtgccgtcttccgtgtgcatgctgggacgggtcttggaggcccagattagctcctggcttgaacttgtaccacccttacctgaaaattgggtctgtaccaaagctcatctgcacgcccctttagggcagggaccaggccccctctgtgtggccctagcacctggccaagtgcaggtggctgcgggttgagttgagctgctatttgctgatgggaatttgggggcstgtcgcttgtcctctttgagcctccatttcctggcctgtcaaattggggcaatgctcctgttatccacacagtgtcatttaagggtgacattagagatggcatgaagtgcccagcacagagcaggtgctcacaggctgttgggtccccaccctactgacacaccaagcacacgtctgccctgccatggtggggagcaaacaatgttatggttccgactccccgggaggccaggccgggcatttcactgtaggatgttgaagccgcaggcagtcgtcgctgcgagaagagagcctggctctgatgtccactgtcttccagggagcctggtgggaaggaaggagtgggcagcggcccctcgctctgcgggcctctcctgccctttgtactccacgaggtgtgaggaagttgccgggtcacccagcagagggagaggtgatgtcccctctgttcttcctaatttgtagctaatcagattctgcctgcagccaggctctctggggatgaatctaataaaggaggcggmgacctggagaggaggacagacmacaagtgaccaggggggacagcacttctttcagtacattttcctgttagactcggggtattagagacccaaagatacccaaggaggagtgagagcgtccctgccttcgaggagcagacagggcaccgcgagggtaaggaggctcygggagagcctggggacagagtgatctgcgcaccgcggtgcctgaggagtggaggcaggggtgtgggcccrcagcagggagccaggctgggccatgtccttggattctgtgagcccaggcgtctcctctagagggcctagcaggaacagtgggggctgcagatggaaacgggcaggatcatgccatgcagttggcatttcactggcactcgggggcacttacgcaggggacagcatgatgttgggagctggctttgtccctggcatgtctgtcacgttgaagagggagaagctgcaggccctgacttgggtggggcagtgaggatgctcaggagggaagtgaggggaggggtgccagcatgcggcggcctgggcagccttctgtggaggagctgaggtgtcacctgggcccggaagaagggcagccctgctagctagtggggagggcatgagagaacttggcgacgatgggagagaaggtgacttgggacgagctgggtttgaagcgtctgtgggatgtccaggtagagatgagtagtgaaccgtcagaaatggggcttgaatttggggtggcggggacagaactgatacccgtgtaggtgacagataaggacagaggcaggagttccaaaaataggatttattgttggctggggcttctggaatcccgtattcccgtccaccctgggaatgtggattggagctatgtttctgggagatgatttgatggaatgtgtcagaagtctaaaacagaacctagcccttgtttcaggattccctgcagagaagtttgcagatgaccacatcctgttgtttatttggtggaaaactgaaatcgaaagctagctaaatgctgaacaatgggaactagttggctaaaaaatggccgtgcaatgcaagagtgtgaggttacgaaaatgatgatgtgggcgcgtatccattgacacaaacatccatgtgtgctacgccctcagttaaaaagcaggttagaaaatggaataaatgatcctgcttctataaaaggatgcatatgtgttttaggaagaaggtgtgtgaggatatagatcaaattctgatggcctgtcattttaccttttttgctgatccatattctactgcagtgcgtgtggattattagcacacacacacacccttttttttttaattaaaaaaaattttttttgagacagagtctcattctgtcacccaggctggaatgcagtggtgcgatcttggcccactgcaaactctgcctcctgagctcaagggattctagtgcctcagcctcccaagtagctgggattacaggtgtgagccaccatgcccggctaatttttatatttttagtagagatagggtttcaccatgttgtggctggtcttgaactcctggcctcaggtgatccactcgccttggcctccccaggtgctgggattataggtgtgagccatcgcacccggcccacacacacaccccccctttaatggtggagttgccaacagttgtccgatgtggcagagagaactggggagcagagaaggagcccatcactgggagggactgaaaaccagctcctgggcactgcagggcagagcgtgtgccgggtgtgaagggggtcagtgcccctgtgctggccactgtccccctagttctgatacagttgctgccaggagaggctggaccgtggcaaggggccagtggggaaccggggcgggatggggggcagcagcagtgctctggggtctgcttgtggtggccatggtggtggcagttgcagtggcaactgtgggccatggcagcacttttccgtggcgcacaggccgctgccgggtgaggggagagccccgcttgttctcctcctgccgcctctcctcccatccccagctgctgggtgctctccggcyggcatgaagctgtgcaggcactgggcactcccttgggctcttagcggggccttctcattgctgcttcgctaggaaccacccgctctcctttcctcctggagggccacgtggggccgagcacctgggacagccgtgctgagctctacccggccccttcgcaggcctcgtttctgggggccttcagttttggaaacctccctgagggcccctctagagtgcgggtccgccccgcccctggtgtggaggggaagtgccctgtccctgtgtgctgacaggtccctgtgtgcagcatggtcggggcacttctactctgcaggcgcggccgggcggggagcggggtggggggcgggcgggggcgtggggggagcggggctggctctcctgggtgtggggtggggaggcctcctcatcgccagcatggagttaaaaaccaggatgggggagggagacttcccatttctcccgagatgtacttcatgacgcgtctggagaaaaggtgtgaccagccccttccttcccgtcaaggagcgcgcttgcctgtgtaactcacctgtaaagcccacccagggaaggccagggcctcatgaaacagaaaacaaagccgggcactgggcccttgagctcactagaatttggggtatctttccttgcaccctcaccgcatatggaactcctggcgtcgtgtcccaggtcacgcctgtccccgtggggaggctgggcccctccccccagccactcccgagacttgagacctctgcctcaggacgatgggtgggaaggggcttgcgggtaggagagcgagcgctgcttccagcgggagcctcgggggagggtggcggggccgccgtgggaggagccgcgccgcatctcaggcgcagtctctaggggctgtgcgcatccgtgggggggacatgcgcatctcaggggggctgctcgcatctgggggtgctgtgtgcatctcgggggggctgtgcccatctagcggggtggctgtgcgcatctggagggggctgtgcgcaacccggggggggtgttgcgcgcatctagcaggggcggctgtgcgcatttcggggggggctgtgcatatctggggggaccgtgcttatctccgggggcggctgtgcgcatcttgaggggtgtgtacatctcggggggcctgtgcgcatcttggggggctgtgtgcatccgcgggggctgtgcgcatctcggggtgctgtgcgctgctcctctgagctctgctctttcttgcagcgtttgcctcagcatggagggcggggccgcggcagccacccccacagcactgccttactacgtggccttctcccagctgctgggcctgaccttggtggccatgaccggcgcgtggctcgggctgtaccgaggcggcattgcctgggagagcgacctgcagttcaacgcgcaccccctctgcatggtcataggcctgatcttcctgcagggaaatggtgagtcccatgggccgctcctcttttcccgggcttgtgggggtccctgagaggcagtttgcaggggtcttgtcacccctgcggtctcttctggttggacaaatctaagattctagaaaagacagagacagaagctggttcagagcctggggagatggaatccaaacccaggctctgaggttggtgagtggcagctcctctccagcctggtccagcattttcacctcgtttccacacacagcatccaaggcgggcacttcttgcagcagagggaaaggaatgaggctccgagccaggccctgctgcaggggtggtttgaattgagggaaaaaaagtaatcatatgtgagagtttgtatgcgtgcgtgcgtgcgcgcgcatgtgtgttgttggtcttggacttggcagagctagagcgcctccccctggggcaggagcaaggcagtgcttggcctccacctgcctccaggccagggatccaggaagcgggatctgcatccggttgacccgctcttcctagaggtggtcctggtgacagccattcctgagcagcagaaagctaagaggcattcctcacgtgacctggccttgcccacctcttctggacgcgggagatcaggctgggatcacaaggttctgcttgggagccaggygcctgcttgctaggagtaggaccatctgcccaggcttaggtgggggcctgtgtgaggagccacgtggctaacaggtgaactcagaggctgcttgttgcctcagtgtgaccaacagtggacctcaaacacagcctggaatttgcaggacacctgacaagaaggtgggtggaggggggcgtctgctgggccgggcagctcctttaggtggggacgagggcagaggcgctgccttcactgcctgtcctggtggtggggactgtggtgcagcctccggccctgccctctttgtgcacagctgggggaggttggagggtgggggaggggtgttaaggtgcacacagccctaggtgccctcagagaagsccaggagctgcccagggtccccagggaacctggctttctcctccggttcctgcagctaggctcctgttacaagccgtcagctcacatcacctctccaccaaggtgcctccttgctgctggggcaggaggcctcacgcacaggcggatgcactcacgttccctctctcacctcccacagccctrctggtttaccgtgtcttcaggaacgaagctaaacgcaccaccaaggtcctgcacgggctgctgcacatctttgcgctcgtcatcgccctggttggtgagttcccgggcgcggccttccccgccacctgcctgcctcttcaggtatggcaaacagccgcttcacctgctctgttccctccccagagctgtgatgggcccgcccccaccccaaacatcccctgcagggccactaggtgctggcagccctcgagctgggactaaagcccagaagtcccgctagctggttcccctgggtcatcttacaccttccttttccacatccaaccctgtcctcatatgacctgtctctggcccaggcttggtggcggtgttcgactaccacaggaagaagggctacgctgacctgtacagcctacacagctggtgcgggatccttgtctttgtcctgtactttgtgcaggtgagtccttccaacaccccgggcctggggccacctaccagggaggtgggaggaggaggggagctgggctgaaatgtacctcatggaagggcctgatttctggggtgtgtgcaggtgagagagctgccttcccaggcctgtgcgggtgcaaagctaggattggcggccaagggtgcccagctcccaggcgccccatggctgactcagcacttttggccacaagcccagctttctgagtgtgccaaggcctcaagcgttgggggaccggtcccttgtccctaagcgcttagtgctcctcccaccactgtgctgaggaggaaggaaaccaggcagggctgaggggctcacagtcgccacgtgggcacgtgggtgtgggcctggccgacctcggctgctggggtgtcyggccgccctgtcccggaaccgtctcctttcaaatcctagtggctggtgggcttcagcttcttcctgttccccggagcttcattctccctgcggagccgctaccgcccacagcacatcttctttggtgctaccatcttcctcctttccgtgggcaccgccctgctgggcctgaaggaggcactgctgttcaacctcgggtgagtgtcctgggtgggagagggcagggcctgggccacccttgcacagacctcaccctgccttcagcttccccagctgtggcttcctgagccgcctctcgtggcgtcacaactggtggctgtagttatgcttgctaagatttgggtgcttggggcttggctttggttagctttcttgattttaccctttcaaagaaacttctgggctatgggcaccctatttattcccaccacgcagcaggatctgcaggacaactgcttagagctagaatattgatctaggtttttacattgcccatctctttttgtctgtgagccatagctggagattgctggttgggggcggggggatggttgttctcttcaggcagggcagggaggcaggggctggtgctggaatccccatggcatctttaaggcccaggatacaaagggcatttggcctaattgtgaccccttgggcagcttctcccttcctctcacccctgcaggggcaagtatagcgcatttgagcccgagggtgtcctggccaacgtgctgggcctgctgctggcctgcttcggtggggcggtgctctacatcttgacccgggccgactggaagcggccttcccaggcggaagagcaggccctctccatggacttcaagacgctgacggagggagatagccccggctcccagtgatgcgcccggcyggccctgggggttcgcggggtgtcttcttgcctgcccctgctgaggcgtcttcaggactgcaggctccggagagtggctctggcagcaggcgggcrcgtgggtgcagctgcatctgtttgagtgctgctttctggggtcaggtctccgcctcctctgcttctcctttctccgctgctatagaccagttcattgtgtgtggctcccgtgtctctgttgcccccttcagtgcagaaggctttgggtaggacttcgggtgttcggtcctggtcgcagagcacagatctttaaagaagcgagagaggaggccccaccctcctggcagcagatgcctggggcaaggccaggggaaactgggggggcctcagggacaggcctggaaaggccacgatggctgctgaattcaaacaaggagtccctccagcctgaataacacgtggcacaaatgggcccggcctttggcagaggagcaagtgatatgatgtgtaaagtatgttggtggtgaaagcaaggttccccaggagaggggagggactggcccctgggaagctctgagatgaggctgtggcccagctgtagtcctgaccttcctcttctttaaccctttagccctaggatggctttggtgggagaggggatagaagcccatgacttcagacagactttctcttggcagatgcaggcgggcctcctcccaggctgctccagacatgggggttggggatggggggcaccttgcagccccttcctgctggggctccctccttgtagcaccccccttgcggctcagctctggtttcctctcccaggctcacccaggctctgctcaggctgggaggcagagggcacaaaccttataattttttaaatgaaaaaccgctgctgctggctgtggctagagccccctggggctgctggagctgctgcctctgttctggaggacgagccttctccttatctgctgcccatctttccaggaagtcaggatggagtcagaacaactacagtcatcccccgtggtgtctgcacatcactccagccccataaagagtgtcatgttagctgagtcaccatttggcttcggcctggaaatagtgtgattagaacactgatcgtgtgcgaggccaggagatcaagaccatcctgactaacaaacacagtgaaaccccgtctctactaaaaatacaaaaaaattagccaggcgtggtggtgggcgcctgtagtcccagctacttgggaggctgaggcaggagaatggtgtgaacccgggagatggcgcttgcagtgagctgagattgcactccagccygggcgacaggctcaaaaaagaaaaaaaaaagaacaccgatcatgtgcttcttggatctggtgactgttctctccctgttttcctttctttttgggtgtttgaggagcatggcttagcttgagacacacacagacactgtgtacttcagtgaagggcttaatatacartttccaaacctgacgactcttcttcttgtaatggctgcccttttcctacctgaggccgtcttagagaaaggggccagtctcctctaatgctcagatttcccatagttggcttttgctgtgtctcctgcctcaggcagtgtcatttctgggagcaggtggttgtagtccaggcccctccccagcagggtctgcccaggctccttcgagcccctttccccgcctcctctcagcctgtccggatgacagtgttcgcctcctgtttagactgtacactcttcaggggtaggggtgccgtcagttcttcaatcagctggcacacacttgtatagtgaaatgtttacatgtgggaaaactccgccttagacaaactaccaaagtacaatcgtgtctctctctagccggaatgctacagagagaaatggaaccttagatttgcaacaaaagtctgtaaactggtctgtttgccaaagtgaacactggatgactaaggagctgmagaagrcsmccagaagcggatttgtggtgggttattttattttgcctgtggccaaycttctgtgaaatacaatgtgctgtyggtgcaacagatgattcaataaatgtctacagcagacctctcgcctgttatcttcctttactgtggtaataaaaggagccggagcttttagcagccagacacatgacgttagctctaggcctgagagaaattgaatatccgcaggctgggcacagaaggtaaagcgattagtgatattgatcatggcctaggggctgaaaaggcccagcggttgtccagtctcgacccagcagaggcagtgttgtttccacatggttagataagccctttcctctcagcctgagagggtggcctggatggtggagctgcaagagcctgataagagccttggcaaggaaggtcccccagtgtttaatggacccctttccctttgaaatcagtctttttgatccttaagaagaggagcaaagcttttggaacgagctgagattccactttagatccacgtacgtggctcaggcagaaggtgagtttttggcaaatttgggtgggatcgtactgtgcgctttgtgccttgtcacttaaagcagtggccgccaacctttttggcagcaggaacaggttttgtggaagacaatttttccacagaccagggctgggggtgggggatagttttgggatgattcaagcacgttacatttattatgcatttttatattattacattgtaacatataatgaaataattatacaacttaccataatgtagaatcaatgggagccctgagcttgttttcctgaaactagacagtctcatctgggggtgatgggagacagtgacagatcattcgattctcctaaggagcatgcaacctagatccctcgcatgcgtagttcataattaatagggtctgcactcctatgagaatctaatgctgcagctgatctgacaggaggcggagctcaggtggtcatgctcacccgctgctgctcacctcctactgtgcagccaggttctaacagccacagacccatactggtctgtggccctggggctggggacctctgacttacttaaagcaatttaaaaactcaccagagctcactatttaaagggacccaacagcaaatcctctaataaggtaacaggagtccctgcttccccgcgttggtctcaactttgtcttctgcattgtagctggtctctaacgtgtaggagccagaacggagaggtctttccttagggcacctgtagagtccctcctgaatcaaggcttccatgtggacctttatttttattttatttttttgagacggagtttcgctcttgttgcccaggctggagtgcaatggcgcaatctcagctcactgcaacctccgcctcctgggttcaagcgattctcctgcctcagcctcctgagtagctgggattacaggcatgcgccaccacactcagctaattttgtatttttagtagagatgatggggtttctccatgttggtcaggctggtcttgaactccctacctcaggtgatccacccgccttggcctcccaaagtgctgggattacaggtgtgagccaccacgcccagctgagtgtggacctttatttactgaaaagcattcaaagcacaaggcttgatacatgtcacaaactggttcctcagtcagcatctcatttctgttttttttttttttttttttttttttgcaccagcctctgaatcttatgggtctctgtgaatattgaagtgatcccagtcaccaagggatgatgcctccctctccagccagccacttcacctcttcctctacgaatctctggctggataatagcagggacctcattttcttactggggtcccaaagcgactcctcttgactgtggcatagagttatttctccaaacaagcacgcggcatttcccaagccatcctcctggacccagcgcctgcactccgtggggcgccattcgggttgcttgctcttttcagaccatcccttctgagagaggaggcagcgtggtggagggaagagctgtcagtgtggctgattcagaggcctacctgtgcctctgtgaccctgagcaacttcagctctcaggatctgcttctgcatttgttttggagacagcagtgtcgtctgtcgaggtgtgaggaatacattagggaacacatgtgaagtccctatcacagtgtctgggacacaatggacctcccaagaggatggcctgttagaatggactctgagcaccttctcttctatgtgggccctctcttcatcacagggccttccagacatgatacctgttatcagtgccccatcttattcctgagaatggaataactcagctgccaagactccaagctcctccaacttgtttttaaagctgaaagagggtgactccattccccgctggttcgcctacccattcccagccgaccgcaggggagtttggccaccatgtgcacgtgcgtactgtgtctgcctgcagttaccaaaaggtacccatgagcagatatccaggggaagaaagtctgacttacttagtgcttcggaggatctacacagacttctgctgagtttgctgtttgcttctactctgagtagctttttattaaggttgagggtaaattctttttaagaagtattaatattttaaatgaatcactccttttcctttcctccaatgtcccaggacttcttaaaaagctgggggtttggccaggtgtggtggctcatgcctgtaatcccagcactttgagaggccaaggcgggaggacagcttgaggccaggagttcaagaccagcctgggcaacataacaagactccatctctgcaaaacaaaacaaaagttagcagggcgtggtggcatgcactgtggtcccaggtacttgggaggctgaggtgggtgggtcacttgagctcaggaggttgaggctgcagtgagctatgatcacaccactgcactccagcctgggtgacagagtgagactccatctaaaaacaaaacaaaacatctaggtcgggcacagtggcttatgcctgtaattccagcactttgggaggctgaggtaggtggatcacttgaggtcaggagtttgagaccagccttggcaacatggcgaaaccctgtctctactaaaaatacaaaaattagctgggcatggtggcgggtgcctgtaattccagctactagggaggctgaggcaggaaaattgtttgaacctgggaggaggaggttgcagtgagccgggctcacgccattgcactctagcctgggtgacagactctgtctcaaaaaaaaaaaaaaaaaaaaaaaaaaaagaaagaaaaaatataaattaaaaagctggggttttgccaatgactttttttttttttttgagatggaccctcgctgtgtcacccaggctggagtacagtggcacgatctcggctcactgcaagctctgcctcctgggttcatgccattctcttgcctcagcctcccgagtagctgggactacaggtgactgccaccacgcctggctaattttttgtattttgtttagtacagacggggtttcaccgtgttagccaggatggtctcgatctcctgacctcgtgatccgcccgcctcagcctcccaaagtgctgggattacaggcgtgagccaccgtgcccggccccgacttacccattttttaatgaaataactggagcagcccaggaatggttttgagattgagcaggtggctgctgccagagtcccctcttctctttgaaggcaactgtggcatctaggctgggctgtgtgttgcctgcagtttgtctgcttccctaggctttgggaaatgcaggtatgcacagcaggaatgtttgtttagcacaaatctgatgtcaagaggaagtggtctccctcctcgcttgtccctgaagtaaacacagaggtagcagttaaacaggaaaggctgcaggctcagtgctgctcccccgcttccccactcccttttagatggtattgagtctccagccagttgcaggaaacctgccacttttccattcacaatgcagctgcctagctctctatatggtgaggactggagttcgaccagatttctgatgaaaagacaaagcccctggaagcagtgggcctccagttgtgacgaagcccttaggtctgcagtgggagctgtgccctctgctcgctaccctctcagcatgcagcctctaaacacagccactcaagctggcagcccacctcagccttggctttggtagggtggctggattgggtgcagcttcagctacaaaatgaaacaagagctcagtgctccctgggtatagctagagagaaacctcttccaatgaagaaaaagcccccctttctcaacaaatgtcacaggcctgtgctgacagctccttagaacggcgtctcttgtccacagctctcttgagggcctaccacagtgtccaactctgaggagaggaggtgctcaataacgtgaccgagcaaataaatgcacaaaggggtggctctgaatgtcccacaagagaccaagcaaatcatcgggaatttggccttagccctaacctgcccaattcctcctgagggagggtgcccccatcactgcatcctcaggagggtaagcttaaaagccagctccctgaagaggctgtaatggaaggagaaaagcatcacaacaccatggttttccaagtgttagccatttataaataagtacatttgctttcatacatacagttccttgtacagatgacaatctgtatacatggggcaggaaaatgcattcatttgaacttttcacatctatctcacacagctcacatgtacagacaataaaactgctcaagcaagtacagcaaaggaaaatgtctttccttatacacaggggtagatgcctctgtggggtgtggggcatccccactgcacggcttcacaactgtgtggtgttcaatatatcaggagagagaacaaacatgcattggataatatactgtacagagaaagtcctttacatctgagtcatagaaaacctaaaggaaaactaagtgcattaaagctttttccagcaagtgtcttgaaaggacagcaaagaggaggaagaatcaaaatcatattagtacaaatcactctttaattgtagactgtacatgtctgtactaattaaaatcatcttggatttggaggagacagaacagagacaaagatgctgtgctagatggaaaggaggccacgcctgaaaaggcacctgccctgagcctgatgaggaactggcctcactcagcaggaatcagccaaaggaaacaaaaaacaaaacaaaaccagaacaggaagtgtaacttacaggatttccaaaatcacctgtgaatgaagtggagatctggagccggcatctcttaactttttttttccccccagtaaattggtatgcaataaggcaggtacattcaagtactgaattttccagaattaactcttgtctggcgctggggaccaaagggattgagttgagccccctctaaccagactttctggttagcgattagcaaaagaaaaattcagccagcaagtgctacaaaaacaaagcagctagggcacttccgttccacagagtaggtctacctggaaaaatgagcgcggcgctggcctgatctctacgcgtccagcggcagcctggcaagtcagctcagcgtcggtatcagagtcagcaggaggcaatgagatgatggggtgaggaaacatgaaagtaacacttgatttttggtgtccaattatgcgttcatttggtactgactttcaaagctctgactgtggccaccatgtggccacaagcatctcagggtggctcacctgctgtgaggctttggacaccgaaatgaaggttaccaacacttcagcccttgagtggtctgtatgacaaaaggagttgatgaaaacccagtgattattcaagtagctctgcacagtggctccaccagccccattgtgcttgtgtccaggcccccagccagccaccttttcttgggagcagccagagctgagttcaaggcattgcatggtgaagggttccatgacacgtctttgcaggtagctcttgcccctaagccctttgttcattgttgttagtcatggtagatggtcggtctggaattcctagaggaagaggagaaagagctgcacctcccagtgagcgagcagcaggaccgcacagccctcggtgtggaggcagcagccggctgcctttgcaggtcggtttcttgagaaatgggcagcccaggaacagacaggcagggtgtgcgaggctgctgggcactgggagcatcaagaggaggctgggcacaggggcgggcacctcttgccccctgggatagcctattccattttgtggcaaagattcagtgagcactggttttgtccaaggcatttctgcagtagaaaaataactctctctgaatcaaaccacccaactgtgacgcttctggagttataaaagctggaggctgagaggaactgacaggagggaggctcatggggaagaaggggcttctccatgtacccatccctctaccagagcaagggagctctggtcaaccttcttccagcctctgcctggctgaagtccaaagcatgtagtgttcaaagagttcgtcttgcacaactggcacagatgcacgaagaccccttccaggcctctgttgccttctcctgaacctctgagcccgcttgcctgttgccctggaagcagctcctctctcccgaggggatgccgctgttctttgctacaaaacaagcgcagtgcagagccacagtgacacctagtggtaaactatggtgaagcacaagtgacatccacatagcccactgtacgtgactaaaatctaaggaaaaatacttatggatattaaattagatactgattaatttttaattttttctattgggtacatctctggaatataaaaataccaatatttagagaggggctcataaactactatacaatattaaggactgagaatacctttctctaagctgttctgtttacaataatttaggaaaagtgtttaataatccaggcttaactacattagcaaacttgtatatctggacaacgacctggggtactgtacatgattctaattagtggaattttcctgagccatcgagtttaagttatacacatctaaaaagaggggcacatgggggaggagcgagaagggtttgtgctctattaacttgggactttaatagtgcacgtctgcaacccggacaagatacaacagcagatacaaaatggtctccattttgtcatgccaaattctcatgttacacaggttttccctttactttgtaaataaacattaattgttaattgttaattgtgtgccttactgatccagtagataaagtaaccgtgtctcaggagtccctaagaacattgctggaaaagcactttaaaatcactgcaaatatttttcatattaaaaaattcttaatctttttgatgcttatatacaagttatttcttgtgctataaatgttgtgatccactgcttgatgtctttcctttccttttttcttgaaaaatacactaaaagacaagagcggttctgctattttctaatgaagacattactcacacttaaatatccagtacttcagttacaaattcaaacagtaaagtgcacccatttatagacatgatgtgatagaaacccattagtgcaagaatcctgggccaatggaacatacaacttggtgagaaacctattaaactgaagtttgtcacctctgtcctccatttcagggtggtatgaattgagtaagtttcatctgaaacatttcctcccacctgaagccagacatggactcagcgagtgtttgctgctggggaaggggcagctctgaaatacagtactcggatcattccatggcagtgaagtagcaaacagggcacagggcacaggcagtctgcttgtaaggaaaaacgtctcctgccccaacaagctctggttggcatattctagtcaaaaacaactggcatgcagcagtgatacctactccctcttatgatggccaaaaagaatggcattttgactgttgacattttaggtgttttgcccatagggtataggccctaaatctt

SEQ ID NO: 96107 - DNA, 20975 bp, Homo sapiens
ctgggcgacagagcaagacgccatctcaaaaaaaaaaaaaaaaaaaaaaaagattacaaagcccagaatgccacaagaccacaggtggtgcagtgaacagggcattgccttgagagtctatcatccctgggcaagtcattaaacataggggtgggggtgggagcctcctgtctgtaacgtggaggtgtcacgtgccaagggctcaggcacacgcgcgcgcacgcacaaacacacccattagtaaggacacgacccctggcattctaatgcgatttatacttttccatgaaggaattcatttccccctctcactaaccccagagacaggtagagccgacaggtggaagaactgaggcccgagagagacagcgggggaccctccccgcgccacggcacagcagctgtccgaccccctcctcacgcccggggggcgcgacggctgccgagggtcgcgggcagggggcgcggcgccggggactacatttcccaggagcagttgccgcggttccgccgttcctggggtttcaagagcctcgcgttaaagggggcgggggaggttgcgcagtccgccagctggaagatggctctgcgcccggtggggacccgagagccgcctgcctgggtgcccaggcggggtccggctgcagtgaagaagccccccagctctgcagtgtccctgaggggaggcgaggcgaggcgaggcgaggcgaggccaagccaattggaggccgtctttcctcgtcttgcccgcctcggcttcggcctctgcgcccaagccccagggaaccccctcccttcccctccaactccccggaacaggggaaggggcggtgaacctcgccgcctggcgggagaaggggtgtccactagctggaagcccctgcaacccgaggcaacccctttccccaattctggcttcagttccgggaatttacaggtcgctgggatgggcggggagaagggacaggagagatacaaaatgaaatgaacgcccaggtgtcagggagctgagccttacagtaccccgcccccaatccatccttctaagtcccgggcctccgcggtaaaataggggtgatggggatagtgatcaaaggcaggaggcgcaaaggatccrgaaaccggtggggagcactgtgcaaactgtaaagcgctgtgcaaataaaattattgatcgtcgtgtcattggattcatccagtctttaagacatgcacggatctggggcgggggatggggtgacatggttctgggctctcagggtggaacatctcggatacggggagtgggggctatttgggtgcgtattaacccaaccaggtcttaatgggaacccgagttgtctttgaaaataaccaaaacaaagccaccagaatgttgtgttttcaaatgacgaaacttaagagaaattgacaccatcaaaagacgraccttgaccttttgaactaacctgaccccccattgcttcccttccccgcctgtgccacggagataagcccagagagaaggcatctgacaccgagtcttgcgctccmcctcccccttcctcccctaatcatttggattaatccatcccttggcgtgcgggggaaacccattaatttgtcctggcttcagagactcccaggtccagtaggagccctcccacacccacgcagctacgatcccgtccccaacatcaaaaccctcgaacccctcccctttacccctccccagtagcccactgtgtctgcaaacagctcttggaccataccgggatgcgttcatcattttgaccagcaacaaactcccactcccagggtattgtttaagtgaacagtgaccggcctctatgcttagggaataaaagcggggttgtgggagaggggcccagggagcaaacgtcgcagaatctcagcccagggccgctgccaagcggacccggcacgtgagtaggaggtcggccgcagacaaggggtcctagggtctctgaggtctctcctgctggcctctgggcccctaaagcccctcgagcttcagaactccctacagacagtggcgccccgtgtccgcctcgtctacacctgccaagcagcacgggaaaatctgtgtgcattttaacaaagacatcgcatcttcccagcaaaatggcggtggtcgcggccacggctctctaaacaactccacactttccgaggacaggtcacaacccaagggacataaccccctcctcgacctctaccctagcgccccgctttcccaagtccccaaagcactcagggcctctcctcattacaggggccccccggaccgtccctggttagagcttctggggcagcttctccattgtggaccgccctcccccgcccccacattgccttcaaggagccttgggacggggactgaacccccaggctgggcctcacggatggggggcagcgagttctgtctctgacaccccaaaacttccaggctaagagaagcacacaaatgaattcccgattagggtatatgggagatgtaggggtctttgaggagaagaggccacccgggaggccctcctcatctctcagagggtccgggcagcactgggggttcggcctcaggagggaacctcaaggcagaggtcggggggcgcgctgggggagagacggcagaggagggggaagggacaaagtttgaaagtacccttccaactctttcagggaaagtttccttgggggccccatggacagagggggtagaggtgtggagggaccggtggcggggtgacccccgagaggtgaccggaccccgggggagcgacccctcccccctgtcccggctcggcccggctgggagtcgcccagctcggggccgcgtgtgttagttggggccgctttccggcagctccaccgggctaggggaccccgcagcgggccgggagcagagcccccggtagcctcaggggagagctttgctacggggggtttcccgcaccgaggctccctagccccgcagagccagccccccgcaaaggggaaatgtgccggcacaccagcggtcctcggcgccgtttggggtgcgtggcgggcgcggggggcggcggccgggccagcgggccgcccggcggggaagcccagggagccaggcagcggcccagggcggcggcggggagcaggaaggcccgggccggggggaaaggtcggatttgctcggcggaagaaacacagatggcggcggcgcagcgccattccgggccgggagcaggcagccagcagccctgtcctcaccgcggtccgcccgccgccgctaaatacccggatgcgccgcccaagcgccagacgcggagctgggaaaagggaggcagaggaggcggaggcagaggcagaggcagaggcagagcccgagcccggtgccgagaccaagcgacagaccggcggggctgggcctcgcaaagccggctcggcgagctctcccgacacccgagccggggaggaaaagcagcgactcctcgctcgcatccccgggagccgcactccagactggcccggtagtcaggggctcaggagcagatcccgaggcaggctttgctcagcctccgacgagggctggccctttggaaggcgccttcaacagccggaccagacaggccaccatgaccgagaattccacgtccgcccctgcggccaagcccaagcgggccaaggcctccaagaagtccacagaccaccccaagtattcagacatgatcgtggctgccatccaggccgagaagaaccgcgctggctcctcgcgccagtccattcagaagtatatcaagagccactacaaggtgggtgagaacgctgactcgcagatcaagttgtccatcaagcgcctggtcaccaccggtgtcctcaagcagaccaaaggggtgggggcctcggggtccttccggctagccaagagcgacgaacccaagaagtcagtggccttcaagaagaccaagaaggaaatcaagaaggtagccacgccaaagaaggcatccaagcccaagaaggctgcctccaaagccccaaccaagaaacccaaagccaccccggtcaagaaggccaagaagaagctggctgccacgcccaagaaagccaaaaaacccaagactgtcaaagccaagccggtcaaggcatccaagcccaaaaaggccaaaccagtgaaacccaaagcaaagtccagtgccaagagggccggcaagaagaagtgacaatgaagtcttttcttgcggacactccctcctgtctcctattttctgtaaataattttctccttttttctctcttgatgctcaccaccaccttttgcccccttctgttctgactttataagagacaggatttggattcttcagaaattacagaataattcatttttccttaaccagttgtgcaaggacagcaacaaccaatctaatgatgagaatgtacttatattttgttttgctattaacctacttacggggttagggayttgcggggggggcttgtgtgttttgttggcttgtttgccatgaaggtagatgtgggtggggagaagacacaaggcagtttgttctggctagatgagagggaacccaggaattgtgaggttagcaggaatatctttagggtgagtgagttttccttgagttgggcacccgttgtgagagtttcagaacctttggccagcaggagagaggtggtagggagcagccagccggcaaaggaaggaggtggaaaaaaaccgccaccgggctgacttccacctcccagtggtgagcagtgggggcccaaacccagtttccttctcatttttgttagtttgcsctttcggcctccctattttcttagggaaggggagtggggtccaagtgacagctggatgggagaagccatagtttctcccagtcagctaggatgtagccattgggggatctttgtggcttcagcaaattctcttgttaaaccggagtgaaaacttcaggggaagggtggggagtcagccaagtgcctcagtgtgccctgttgaaacttaggtttttccacgcaatcgatggattgtgtcctaggaagacttttcttttcctctggatttttgttcctcctgtacaagaggtgtctttgcttggtttggtggggctgcggccacttaaaacctcccgatctctttttgagtcctttattataagtagttgtagctgcgggagggggagggggagtgggcgggcagtggatagtaagacttactgcagtcgatttgggatttgctaagtagttttacagagctagatctgtgtgcatgtgtgtgtttgtgtatatatacatatctagggctagtacttagtttcacacccgggagctgggagaaaaaacctgtacagttgtctttctcttatttttaataaaatagaaaaatckcgcacttgcgcgtcccccccccmcccccttttttaaacaagtgttacttgtgccgggaaaattttgctgtctttgtaattttaaaactttaaaataaattggaaaagggagaaactgagcggtgtatttttcctcactttgaagactggagaatgaatgcggagcggttaggcgggcaggcagtggggacatctggggcgtttgcacctgagaatggcgggggagggttcaggagctggacagaagccaggaatccttagtcccggaggctgcggaacgtgccttagccggcttctaggcttctgcctttggggtccagagggtaccccatttccggccgagaggtgagtacgtgggaatgcggtggggagtctggtgggcttggccctgacgcgacttcctccgcccccttccctcccctctgccatccggacttcggcagtctcaacttacaagtcaagccgctcggtccctggcggatcccgccaggccccgcccacccgtcctaggcccgcctccccgcctttttaagcgagcccccctagctccgattggctgctggagcccggcccccggccacgcgaccaggctgcgtccgcgatgcgcacggctcccaggcaggcaggcgcgctcgggcgaggtaggagcgatgtggcctgggaacgcctggcgcgccgcactcttctgggtgccccgcggccgccgcgcacagtcagcgctggcccagctgcgtggcattctggagggggagctggaaggcatcyycggagctggcacttggaagagtgagcgggtcatcacgtcccgtcaggggccgcacatccgcgtggacggcgtctccggaggtaacgctccgttccgggagtcgttccaagacctttcccgagcttgcgctggaatggaggtcctggaggtgggggtgggcggctcctayactcttagctactgttccccttcgcatctctcagggcgactttatggcttcctaatattgactcttgcctggttaaacccttttgacggagggaggcgatttgcccagcaagaaaacccgcatttcttgagcggctcctttgtgaaggtctctaccaattgttgctgcacgtgaactcctgctaacttctagacgcaggaatgactaattccactttacaaacgaagaggctgaaatccacagatgtgaaatggcttgcccaaaagcccccagctagctgmaggcagcgctggaatattggagctggaacattgcctgactggccagagaggacagcttgctgggtaaactcatagcaagcaaggggtcccagggctgccacagaaatcacatgatgagttggccctgccaggtctccctcatttctttctttccttttttttttctgagatggagtctcgtcttgctctgtcgcccaggctggagtgcagtggcgagatctcggttcactgcaacctctgcctcccgggttcaagcgattttcatgcctcagcctcccaagtagctgggactacaggcacgtgccagcacacccggctaatttttgtatttttagtggagactgggtttcaccatgttggccaggctggtctcgaactcctgacctcaagtgatcctcccgcctcagcctcccaaagtgttgggattacaggcgtgagccaccactcccagccctccctcatttcactctaaccagtggttacacctgacttattcgtgtcaggcctcaggtgagtggtratcatcaacaagctcccaaagctgccttctgcccaggaaataggcatagaacccttggtgctgttgcactcatttgtaaaacagaggtcccaggtaatcccttctctccctcaggggaagcttagagccggtcaaaagatgggaaattaggagacccaagttctcatcctgtttttgcctttcccaggctgtgtgaactttcccctctggctgtttgctcctaaggtcagctgtgttcactctgggctttagaattcggggactggtatctcaggcacctacctttgggggtgtgattctggcagcaaagtaaactgtggagttccaggactgcagcaggcgtctgatccagccctcttctttaaccctcaaggaaaccaaggggtcagataaggagtcagtggtggtcttcaggcacaggagaagcctgtgaggaagggctgagttcctccttgggtagaatgtgattcaaagccagagtttaggctgggcacagtggcttgtgcctgaaatcgtagcactttgggaggccaaggcaggaggattgcttgaggctaggagttcgagaccagcacggacaacataatgagaccccatctctacaaaaaataaaaaaatttaatcgggcatggtggcacgcacctgtagtcccagctactcaggaggttaagtgggaggattgcttgagcctgggaggttggggctacagtgaaccatgattgcmccactgtactccaacctgggcgacagagctagaccctgtctcaaaaaaaaaaaagtttaaacttcttgctcttcaagatgtgtagcactgacgctccttctgtagctgtygaatttggtgcctcctcaatggtgactccaggtctgtttcctttctggaccatttccccagggcctggcactgtcatctttccaggcctgccctygccccacctgagctgctgtatccatctcctctccttcacctcaggaatccttaacttctgtgccaacaactacctgggcctgagcagccacyctgaggtgatccaggcaggtctgcaggctctggaggagtttggagctggcctcarctctgtccgctttatctgtggaacccaggtacacagtgagtggtggggggttgtggggactgaccccagctgcctgcttcccacagtcagcaaggctggtttagccagctcagctcagccacagccctgggcctactgttggcctcagagctgtgcagcagaaaggctgagtgcaggcctctgttttgctgaaaagctttggccaaggaactttatatatatattttttctttttgagacagagtcttgctctgtcacccaggctggagtgcagtggcacaatcttggctccctgtaaccttcgcctaccagactcaagggattctccatgcctcagcctcctgagtagctgcgattacaggcatgctaccacacccagctaatttttttttttttttttttttttgagatggagtctcgctctgtcgctgaggctggagtgcggtggcatgatcttggctactgcaagctgcgcctcccaggttcacgccattctcctgcctcaacctcccgagtagctgggactacaggcgcctaccaccactcccggctaattttttgtatttttagtagagacggggtttcactgtgttagccaggatggtctcgatctcctgacctcgtgatccacccaccttggcctcccaaagtgctgggattacaggcgtgagccaccgcactcggcctaatttttatatgtttagtagagatggggtttcaccatgttggccaggctggtcttgaactcctggcctcaagtgatctcctccaccttggccttccaaagtggaaactgcctttttgagcattcattttcccacctgcaaaacagagtccctcacacctgaccttctataagaaaagaggagtaggcggcaggaactgagactaagggctctggggctgttctgacgggagcacagttgccagtgctgccctttagtgtccctgttcctgtgggcaagtatcttaacttttctctgtctcaattacttcatagggaaaatgaagataatagcacttaataggatcattacaaattaaagacttaatacatgtaatgcttagaataggccgggcgcagtggctcatgcctgtaatcccagcactttgggaggctgatgcaggcggatcacctgaggtcaggagttcaagaccagcctggccaacatggcgaaaccctttctctacaaaaatataaaaattagctggcatgatggtgggtgcctgtaatcgcagccacttgggaggctgaggcaggagaatcgcttgaacctaggaggtggaggttgcagtgagctgagatcacgccactgcactccagcctgagcaacagagtgagactctgtctcaaaaaaaaaaaaaaaaaaaaaaagcatagaacagcctggcacatagtactgctcaatgaatgttggctrttatttattttccaaatgttacaaaataaatttatataagtatgaaacttaaatagtacttattatgtgccaggaattcttttaagaaaattacaactattggccaggcgtggtggcttatgcctgtaatccaggcactttgggaggccgaggtgggtggattactgagttcaagaccagcctggccaacatggtgaaaccctgtctgtgctaaaaatacaaaaattagctggccgggctcgcttgaacccatgaggcaggggttgcagtgagccacgacggtgcgaccacactccagcctgggtgacagagggaaactctgtctcaaaaaaaaaaaaaaaagaacattacaagtattaactcattaatcctaagtgatagttgctattcttattcccgctattgagatgaggacactgagatccagagaggttaagtgacttgcccagaggcacacagcctgttgtgggatttgaaccctggctcaagagtccatgctggctgggcatggtagttcacacctgtaatcccaatacttttggagcccaaagcagaaggatcacttgatgcctggagtttgagaccagcctgggcaacatagcaagaccctctctctaaaaaaaaaaaaatgtttttaattagctgggtgtggtggtgcgcacctgtagtcccagctactagggaggggaggctgagttgggagsatcacttgagcccaggagttcaaggctacagtaagctatggtctcactactgcactccagcctgagtgacagagaatccctgtctcatttgccaaaaaaaagaaagagtctgtgctcctgactacttgtgattatcattaactgccctctcagaaaggtgagagtgaaatgaatgtcagaggcagaactcctgactcgcatccagtcacttcccagcaaagccctcacccagacccaacagttttcaaatytacaaattagaggcccaggtgaacccagaattacctctgtgatctttttcttcaccattaggcgaccaaaaaagacactcagtatggtgttaggaagacacatctttcttctccacgagtgcccgtaattccaccattagactgccactgtaaaaccaaagtctgcccagggagggaacctaacaggtccccagttcctcagtgggaactgtctgtcagattcctggcagctctgggatagcccatgtgtggcagaaagtaaggagactgaggctgcaggctttctgggttgggtctctgtggtcctscaagcctctgtcccctcgaacttgtcccacatgaccccacaggcatcaacacgtgtctcactcattttcttcagagcatccacaagaatctagaagcaaaaatagcccgcttccaccagcgggaggatgccatcctctatcccagctgttatgacgccaacgccggcctctttgaggtgtgtggaagctgtcctgcgggtgagggttggtggggcctgttaggctgaggaaggcttgggtgtgggcagtcgggagaacctagcaggattcagtgccatgcctagaggctccagagcccgcttctggmggtcaaggttgggccaggtaggtgctccaggaggaatcctggggcttgcagggagcctgagttccagagcctttgggggataagctacatcagctggaaggctgggggaggcgggggcctggtactcaccaaatatattctcacctcctcttactagagcagggcgctggtccagcccggcactgagacacgggggccccagagagaagcacagaacaccttgcctctctacccagaggagcgccctggctggcagtacagttttttgatttgctggagtcccggtcaagggagaagcccagggtggttaaatgatggctctacgctcactgcctccctccaggccctgctgaccccagaggacgcagtcctgtcggacgagctgaaccatgcctccatcatcgacggcatccggctgtgcaaggcccacaagtaccgctatcgccacctggacatggcygacctagaagccaagctgcaggaggcccaggtggggcgacgcctgggtccaccctcagcctcyrcctggggaaggaagtgaggcttagagaggccaactcctcactcacagagatagcctgaaagtttgaaacagcagagatttgtccaagatgtgaacccagatccctcacacccagagcattattcttttttttttttccctgagacagagtttcactctgtcgccaaggctggagtatagtggtgtgatctcggctcactgcaacctccacctcctgggttcaagtgattctcctgcctcagcctsccaagtagctgggattacaggcatccgccaccccacctggctaatttttgtatttttagtaaagacggggtttcatcatgttgtccaggctggtctcgaactcctgacctcagttgatttcacccacctaggcctcccaaagtgctgggattatagacgtgagccactgtgcctggcaccagagcattattccattgtgccatggtgccttgaggtttttccctgtgtatgtgtgacagtctcactctgttgcccaggctgtattgcaatggtgcagtcatagctcactgcagcctcaatcttctggactcgagcgatcctcccacctcagtctcctgagtagctgggactaccggtgcccaccacacccagttttttatttatttgttttttagatggaatttcactctttttgcccaggctggagtgcaatggcgtgatctcagctcactgaaacctctgcctcccaggttcaattgattctcctgcctcagcctctggagtagctgggattacaggcacacaccatcgtgctcagctaattttctatttttagtagagatggggtttagccatgttggccaggctggtttcgaactcctgacctcaggtgatctacctgtctcagcctcccaaagtgttgggattacaggcatgagccaccgcacccagcctgtttgtttgtttttgagacagggtctcactataatgctcaggctagtcttgaactcctgggctcccaaagttacaggcatgagccaccatacccagccagtttttaaaatttttagtagagacagggtctcactatgttgcccaggtgggtctcgaacccgtaagctcccaaagtcctgggattacaggtgtgagccactgtgcccggcctgccttgagtattagcaagcaccttctgtgtggcaggcccttgctaggcataaggatagaatgtacatgttggtgagacctggtcccagcctagcctgccctctgggaccttacacaggagactgagatgtgagcccattctcactgtccagagctcagggtggagatgggtgacgctgagaggcacagatgagggagaggatgttccagcccccaagatggtggtacctctgtgcccacctctgtgctgggcactgggcaggatgagctctcagagctccaagcagcacaagagacgggtggtttggcccaacttgacaccacccaccatctgctcatgtctttcctgcagaagcatcggctgcgcctggtggccactgatggggccttttccatggatggcgacatcgcacccctgcaggagatctgctgcctcgcctctagatatggtgccctggtcttcatggatgaatgccatgccactggcttcctggggcccacaggacggtgggaccatgtggcacctgaggcctggggtggggcttctgagggtggctgggaaacgaggaggccagtccccagcatgatccataatccctgggctctcaggaggccagtgacagcagcggtggcttcccttgcaggggcacagatgagctgctgggtgtgatggaccaggtcaccatcatcaactccaccctggggaaggccctgggtggagcatcaggtacctgcaaggttgtgtccctggggtccccttgtccttttgaagggccctggaggggctcagggaagtggggagggcagcatggactgtactttcaggagggggttgggtaggctctggcccctgaccaacccctccccccacctcttcccttcttctcagggggctacacgacagggcctgggcccctggtgtccctgctgcggcagcgcgcccggccrtacctcttctccaacagtctgccacctgctgtcgttggctgcgcctccaaggccctagatctgctgatggggagtaacaccattgtccagtctatggctgccaagacccagaggtgcgactcccagcagggcaggctcgggggcggagagacgtggtgagagccagcctcatgtgtctgcccaggcccacagacagctctgtgcccaccgggtctgcttctgcctrttcccctcccttctctctgtccctgcctctcccctctagcttctgtgtctccttcttatccctcctgtctttccacctcccttgttgttctccctgccccctgcctggctcccytctgcctcttagagcttgtaactgtctttgttgatccttcttgcagacttgggcatagacctcgggcctggtccctgcaaggagcgggtgtgaatgctccacggccccttagctacctgtgacaccttgtgcccacaggttccgtagtaagatggaagctgctggcttcactatctcgggagccagtcaccccatctgccctgtgatgctgggtgatgccyggctggcctctcgcatggcggatgacatgctgaagagaggtaagggtgctgagacaagggaactggtggtgggtcctgagagaagagaargggaaacccctagactgtgacccagccccgtacccagccacgctgcggcctcttaggccagctgtctgtctaagcttgaacaccccaagccatgaggcagtcccgaatctgagacctggggcagttcccttgccctctgtgttctgcccccaagcctgttggttctggcacrcccttgctttctaccctcccaggcatctttgtcatcgggttcagctaccccgtggtccccaagggcaaggcccggatccgggtacagatctcagcagtgcatagcgaggaagacattgaccgctgcgtggaggccttcgtggaagtggggcgactgcacggggcactgccctgagctctgggtaaggacgagaagagccaaggtccgcctrctgccacagggtcaaaggaggttttcgatcagcccagaccagaggctytgagccctgaaccaaagtcccagagctgggctgggacgtgacctgtgctgagggctgtgagaatgtgaaacaacagtgtgaaaattggctgtgacactctggtctgctttattgtctctgggcaggcccagtcctgtggccggttgaagaatcaggcaggagccagggctctgaggggaggcgcctgaggactgcagatctccactgacctctttccctagattaagatgggacccagtggccgggcacggtggctcaggcctgtaatcccagcactttgggaggccaaggcaggtggatcacctgaggtcgggagtttgagaccagcctgaccaacatggagaaaccccgtctctactaaaaatacgaaattagccaggcgtggtggcgtatgcctgtaatcccagctgctcaggaggctgaggcaggagaatcgcttgaacccgggaggtggaggttgcggtgagccgagatcatgccattgcactccagcctgagcaacaagagcagaagtctgtctcaaaaaaaaaaaaaaaaaaaagctggcacccaggcctttgggagataggcccagtccaccgtttgtctcgggtagtttctgtgctgctgtggagggctgctgagaactagccccacaggccttttaccctgccactgcccgctactctgcagcccctgagtctagtcttagagtctagcttcttccttctccccactggaagatgtcctgtagctgcccagataggaggaggctgggtgtccatgtttggaaggagaggcagaggattcaggcccaaaagaaaagaatgaggatcacccctggggaagctccagacagtctggaaccctgtgttcgcgcccactctctccctgccttactctggctttcggcaagctccagtccctgtgtgtgcctcagtcctcctgccactatgccttgaggtctgaggtccttccatctcgctcattccaaggcctacgatgatcagccaccagggggtgctgcgagcacgggccgcggccgccggctcgccccgcccctccagactgggggccttgggccgcggctgttcaggctgcccagcagtcaaggccaggagaggcgatttgctgctgccaaggccccatcctcccttgtgccccacaacggctcgccgctttcctgttggaggggcctgcgggaggagggcggtctctccctggcgacctttgtggaccccttgtggggtggggagtggggtccccgcagctccaccctcagcgtggtgtgaccttgggaagctcttagtttgcttgggacagaggacgaaaaggccctttatcattaacgacatgaaactagccctacgtctctctctgacgtcctgcacctccagcccacccatttgcctgttatcttgggatgaacaatgtaatatgagctgggctctggcccagccctgcaggatctgaaagctgggattcagggaatcccagcctgcgatccggaggaccttgctgctggggtccaggagctgggggagggggggtgtggggggtcggtgtgagggtggaaggcagcctggctggggtagctgtggccacattagcggcaggaacatttgcagcccaccaccaccggctagggcacgtggcaccaggcgcgctgctgcaggggatgtgcacaagggctcaaccagtaatgtcgagccagcagctggatgagcatggtctgctctagccagcagctcatgttaagcgccacgggcagctgcggggtgacgtgtggcagtcggtgtgctgcacccggcggggccagaacagagggcccaggtccacccagaccgacgtgaggcggcacgaggcgagatccagacagcggcgcagaaagtgcgtcgccgcccctgtggctcccaggagccgccgctggcgttgccctgctgcgctggcagcgccgcgaccccctgggctagccgatcgcggtagggctccacgccgttggccaacccgcggctcagcgtgtcctgctgcaccagcccgggtccgccgccgcgcttcttccgcagtcatccagaaggtgtctgtaggaggcgcagcagccgctctgggtgcacgtgtttcggcttgggcgcctaccggtagtcgccggccgcccacgacaagctgtagggccacgcggggcgggagggccggccgtggaccagctgcaagtctgcgttctgcagaatcagaggctctgaggaccgccccaagggcgcaatgtccttgttctctgcgtcgcgcacggggttcagggccgcgggctaccagaagcggcagtaggagtggatggaggtggcaccgggcgcacccaaggtctaggctcacggccgcgctctttatggccgcctgttccttcctccttccctccacctccgctctcatatcagcttagccttgccgctgctgggagctcatcgccctaggccaagaaggaccttgtgggcagggggctcccaagggccaggagtgcgaagtcatgaatctcagatgctttccagcccgttccagggttcaggcatgcacattcgtccaggcttctgggagtctaagggtgcgttactttcacgcagtggttgcaggtctgtcaaagtttctaaaatcccaccaagctgagtctcgccattcagggatcataagagtctacaattcctttgcgcaattcaattctgaattcaattcagaattaattcaattctggccgggcgcggtggctcatgcctgtaatcccagcactttgggaggccgaggcgggcggatcacgaggtcgggagatcgagaccatcctggctaaaacggtgaaaccccgtctctactaaaaatacaaaaacaaaacattagccgggtgtggtgggcgcctgtagtcccaactactcgggaggctgaggtgggagaatggcgtgaacctgggaggcggagcttgcacttgcagtgagctgagatcgcaccactgtactccagcctgggcaacagagcgagactgtctcaaaaatatatatatatatattaattcaattctgaagcttctgaattcaggtttggcaagtctagattagattcctaatagtttcaattccgtgagactctgcttccaaaaattgaggaatttctgcatctaaagaaggtgacatcaggctctatagaggcacctctgagccctcgtgaaaaccccggggcctttgaggagctggttcttttcttttcttttttttttttttgagtcttgctctgttgcccaggctggagtgcagtggcacagtctccgctcactgcaacctccgcctcccgggctcaagccattctcctgcctcggtctcccaagtagctgggattacaggtgtgcaccaccatacctggctaatttttagtagagatgggtttcaccatgttggccaggctggtcttgaactcctgacctcaagtgatccaactgccttggcctcccaaagtgctaggattacagacatgagccaccacgcctggccttaaggagctagttctgagcatctaccccagctcctccggcctgggatgcgagtcctggctccatcagcgcccctcacactgttttctctccccttacgcacttccccttgatgctccccaaccccagccccagcttctaaaaacactacactcagcccctccacctctcccctcccttccttaactcactgcagactgccttttgccctcaaaacacctgtccagtttaccagcagcctcctcattgctgaatccagtgtaccttgctccccaggtgctagcctccctaaccctctggaggcatttggccatgtggcccctcctccacacagttcaggacagaactccatgaccaaatcacacagccgttcaccaagacctattctcctctttggctcttgcctagacgagaggctcctaacaggtcactcatcaaatctctccccctctgtccatccttttcaccccgggcaataatagactttttttttttttttttttttgagacagagtcgctctgttgcccagtctggagtgcgagcgatctcggctcactgcaaccaccacctcccaggttcaagcgattctcgtgcctcagcctcctgagtagctgggattataggtgtgagccaccatgcccagctaatttttgtatttttagtagaggcagggttttgccatgttggccagtctggtctcgaactcttgacctcagatgatccgcccacctcagcctcccaaagtgctagcattacaggtgtgagccgctgcgcctggcccataacaaactttttacaaaagataatgtggggggaaaaaaagaaagaaagaaagaaaatgtgcgggtcatgtctctgctgtagaatcttagtagttccccgttgctatcaggtaaagccagactttttggacaggtacctaaaccatctgggctccagctggactaaggctctggaaagagcttccggagaaggatctcaggatttgcagagcctgagggaggagtctctggagtctgccgaaaggagactcaagtcctggtttcccactccaggaaaccccagtcaagactaggaatcctttttttttttttttttgagacggaatctcgctctgtcgcccaggctggagtgcagtggcacgatcttggctcactgcaacctccaacccctggcttcaagcaattctctgcctcagcctcccgagcagctgggattacaggtgcccgccaccacacccagctaatttttgtatttttagtagacatggggtttcatcatcttggccaggctggtcttgaactcctgacctcatgatccacctgtcttggcctcccaaagtgctgggattacaggcatgagccaccgcgcccagcctcttcttttttttttttttttttttttgagacaatgtctcactccatcacctgggctggagtgcagtggcgtcatctcggctcattgcaacctccacctcccaggttcaagcgattctcctgcctcagcctccagagtagctgggattacaggcgcccgccacgacgctcagttaatttttgtatttttagtagagacaaggtttcgccacattggccaggctggtctcgaatttctggcctcaagtgatctgcctgcctcagcctcccaaagtgctgggattacagacgtgagccaccatgcccggcctaggaaccttttctaaacatggattggagcaagaaggtgcagggataggggatggagtcacatcaggctgggccacaggaggtgggagtgccagagactggctgggccctgggcacagaggggttaactacaaagcaaatcacagagagcgagatcaatgggttactggctgcagagagaggaaaaggcagcagcaacgcagagaggcagagaagagccaggcagaagagcctgccacctgggggaaatcagggactgaggaggaagtggccagtggctactccagagggagtgcccaactccggctcagcagagggggcagaggagaggaggggccttaaaggcaaagggggagaagtagaaggcagaccagtacctgcagggaggcaccaaggggcagccgctgaatcaggaggcccacccagcccggccattccacccaggatcaagcccactgcccaaggcggaggtgggtgttgcccatcctgggctttggggacctactgcatgctgggtgctgggatgggggcagacattgcctttcttccctactccctgcctgacccccctttcccctactttgtcccaccaccccagtggtctcaagcctgcaaggagatccacaggtagtaggagacatgggctgtagagtgggatgggggtgagcatgggtgcggtgtgcacacacacaggttgtcagaggcaccacctgttacaagctctcagatgagcactctagcttaagaggcaggataccagggtggcaacagccccagagctgccatttcgagtgtgatattatcctcccatgtcccctctctgggcctcaatttccctatgtgcagagaggaagcagtgacctacacggtcttcccagttttgccattgtgatgatctcactatactggaccc

SEQ ID NO: 96108 - DNA, 82311 bp, Homo sapiens
  misc_feature (1)...(82311): n = A,T,C or G
atctcatggtattgacttttgctcacacagttctttccacctagaatgttctctttcctaatccagccggcaaactcctacttaacctttgacatccaatttaagatcagtggtgggtaaatttttttttctgtaaagggccagagagaaatattccaggctttgtgggccatgaggtatctgtcatgattactcaattctcccactgcagaaagcagaaacgtgtgtaaacaaatggcgtggctgtgttccaataacacttgtttacagaaacaggtggcaggcaggatagtttgcccactcctgctcaagaataatctcacaaagcttcccacaggaaggagtttgacaatgccttctagcaatggcttacgtattttatcgtaacacaaacttggactgtaacgtacctatagctgtgatgattaaatgggctggtggtcagaccatcatctctcacctggatttctttttctttctttctttctttctttctttctttttttttgagatggagtctcactctgtcacccaggctggagtacagtggcactacctcggctcactgcagtctctgcttcccgggttcaggcaattctctgcctcagcctcccgagtagctgggattacacgtgcccgccaccatgcctggctaatttttgtatttttagtagagacgggggtttcaccatcttggccaggctggtcttgaactcctgacctcgtgatctgcctgcttcagcctcccaaagtgttgggattataggcatgagccaccatgcccgaccatggatttctacaatagcctcctcactggtctcccagcctctgccttcccttacactctattctcactgaacagacataagctgttaaagtgtaaattcattctggtcactcctctgcttaaaaacctctcatggttccctattgccctgatattgaaagccaaagtcttaaaatggtttccagtgtcctacaagttctactcccaatatccttttaacctcaacgttattgcctactacacccccactggctctctactccaaaacaaagctataatagcctctttgcttttcctcttaaaacaagccaggcgggcttctgcctcagggcctttgttcttgctccatctggaacactcttttcctggttgtgcacatagctcactccttcgcctccatcaggtctttatttaattatctcccttctaacgcttttcctggcccatctagttaaaactgtgaccctccccggtctctccttcctgtgtttactccccagcattcctcaccctctaactcactatatattcccccaactttttgttttgttttgttttgttttgttttgaggcagagtctccttctgttgcccaagctggcgtgcagtggcaagatcttggctcattgcaacctctgccttccgggttcaagcgattctcctgcctcagcctcccgagtagctgggattacaggtgccagctgtcacgcccagctaatttttgtatttttagtagagacggggtttcaccatgttggccaggctggtcttgaactcctgacctcaagtgatctgcccgcctcggcctcccaaagtgctgggattacaggcatgagccactgtgcccagcttcctccaactttttaattataaaaatgttcaggccaagaacagtggttcatgcctataatcccagcactttgggaggctgaggcaggcagattgcttgaggccaggagttcgagaccagcctaggcaacatggcgaaaagcagactctaccgaaaaaaaaaaaaagcatagtggcctgaacctgtagtcccagctactcaggacactgagatgggaggatcgcttgagcccaggaggcagagattgcagtcagccaagatcaccccactgcactccagcctgggtgagagagccagaccctgtctccaaaaaaaaaaaaaaaagaaagaaagaaagaaaaagttcaaacacacagataattggaggactagtgcaaaggtattcaaatagacatgcccagatcccacagttaaggtgctttgaatgtaagatgctaacatgatgacaccctcactcaaagacattagcaaaacacactctctgtttccttctctatctagtttattctccgtctttccccaccaggatgtgagcagcacaaaggcagggatttttgtccattttgttcagtgcctgggattacacgtgcaccaagaacactgcctggcacataatgagtgctcctagagtttggagagagaaaagacaagacaggtgctgattctggttctgcctcttgttgacactggcaactggcactgcctctcattggcaactctggggataattttcccttgtggaacctcattctcttcatctacaaagtggggatggcagtactatatcacagggctgttgcaaggataaaaaagtaagaagtcggctgggggtggtggctcacacctgtaatcccagcactttgggagactgaggcgggtggatcccctgaggtcaggagtttgagaccagcctggccaacttggtgaaacctcgtttctattagaaatacaaaaattagccaggcgtggtagtgcacgcctgtaattccagctactcgggaggctgaggcaggagaatcagttagaacctgggaggtggaggttgccgtgagccaagatcgcgccactgcgctccagcctgggtgacagagggagactctgtctccaaaaaaaagtaaaaggtgtgatattgcactgttagcatgttagttagatttccatctagctccttgaaggaaaagattagtctagtctgaccctctgtgctctgggctcttagagggcagacgccctccctgatgtatgggaggagcctagcacaacaactcaggagaagttcttttgactttaactgctagcagctccatctgctagcactacagaacacactccctcgtgcttacttgccccatccctttacttgctcattcaatgctacctaataatcccctctattccatcttttgatttatctactcattaaatggtttccaccagaaatacctagggaagggatacttaacttcatcaggtactgagattctattttgtgaatgtcttctgtggatctttgactgtttccagcaattgatccagcctctcttggccttttctgcattttattatttatttatttattgagatggggtcttgctctgtcgcctaggctggagggcactggtgtgatctcagctcactgcaacctccacctcctgggttcaagagatttttctgcctcagcctccccagtagctgggattacagttgcctgccaccacgcctgactaatttttttgtatttttttgtagagacggggtttcaccatgttggtcagaatggtctcgaactcctgacctcaggtaatccacccgcctcagcctcctaaagtgttgggattataggcatgagccaccacacctggcccttgtctgcattttagattcacctgtgtatctgcatttccaaatgtgctttgcaaaatcctgaatgcaagggtgggtgtttgttgaagaatgggacacctcatgttgcccctgtgggttttctcaggaaggaaagattgcttggcagtgcgtggaatgcatggccttttgcaagctccttgataaccatcgctctaactttgcttgtttggggtgtggaggcaagatattttcattgagaattctgagtctttatccttttctctccacttcaagctgaaacttttttttttttttttttgagacatggtctcgctctgtcacccaggctggagtgcaggcgatcttggctcactgcatccttgaccccccggcctcccctgcacagtagctgggaccaaaggcatgcaagaccacacctggataatttttgtattttttttaaagacgaggtttctccatgttgcacaagctggtcttgaactcctgagctcaagtgatctgcccacctcggcctcccaaagtgttgggattacaggcgtgagccactgtgcgcagtcaagctgaaactcttaagcaaattttaaatcttactttaaggaacaatttcctcacctgtaaaatggggacacgaggatatgatggaagtgaagtcactttgtaactggtaaagctctgtacagatattagttaagatggttaatttcattaacctgtgaagattcttaactaaaccttgcgcaagttgcattggctgccctgtctaggcactaatatctttagacggactaaggaggaaacacactttttttttttttgagacagagtctggctctgtcacccaggctggagtacagtggcatgatcttggctcactgcaacctctgcctcctgggttcaagcaattctcctgcctcagcctcctgagcagctgggactacagactatggccagcacacccagctaattatttgtatttttagtagagatggggtttcaccatgttggtcaggctggtctcaaactcctgacctcaagtgatccacccgcctcagcctcccaaactgctgggattataggcgtgagccaccgcacccggcctacacgcttcttttcacaagaatgacacccgcaactatacttcccacgtaaatggagagcagtctggcagattcatctagacctagggttgggtgattattagggaaagaaaaggtccaaccaagccagtgggctgaagagaggacatgacctgctcagtccgaagcagatgtgtgactaaagtctagtctcctggcttctctgcaaaatacctcattatcggcattattaaccctaacaactgccatttattgaaatcccactatgtgcacgaatggggaccaatttacttctagatattacaacaatcttgtattactgtgcccacttcctggatgatgggtctgaggttcacagagatcatttgcccaagttcctactgaaagtgctaaggtatttcctgagactggctcagggtgtgttgccagacaacaatgcacacatttttaacacaatactaaacttagtatattatacttatgttaaaaatttcggagccgggcgtggtggctcacgcctgtaatcccagcacttcgggaggctgaggcgggcagatcacttgaggtcaggagttcgagaccagcctggccaacatggtgaaaccccgtctctactaaaaatacaaaaaattagctgggcgtagtggcgggcgcctgcaatctcagctacgcgggaggctgacgcaggagaatcgcttgaatccgggaggcggaggttgcagtgagcgagatcgtgccactgcactccagcctggtcgacagagcgagacttgtctcaaaaaaaaaaaaaaaaaaggacatgtggtaattcccctagggaatttggccttagttgtgaaaaataaaaaagctataatcaatttctgttctatcggaaaaaaatgtattggctgtttagctgaaattcaaatgtaacttaacatcccgtattttttatatgctacatctggcaaccctggcttgaggctacctggcaaaaatcaaaacaggttcctccttgttatgccctatgcctctgttgcctttatttttatctttacgagcaatcattaacagtaacttcagactccaggctctggtcgctttaggaggcggaaggcggactagggtaggactcctggccctcatcaacaggactgccaagaagccgggcaccttctgccccgcacaaacatggccgcgcctcgccgccgaggattggctcccgccgaaagctcgtcctcctggctaagggagccccttccattgggcagttaaaaaaaatggcggaccccgcctcccgccgtcctcgggcgcgggggcggagcctagaggaggcctgggacagggccaccagtgattggcggagagcggtggtcaggccatcacgtggcccgaggcccgtttgtttgcggaagtaggaggaagtagaagtgctgagtaagccgaggtgagtgacctcgcgggtgggcggggcctgggggtccgttccccaacttcctcggcgctccggactcccaagtctccgccggaccctcctttggatattcctcgtgtctccgattctgaggcatgtcctccattaacccttatgtgactccctgagtgcccccaccttccatcttttcatccccctgcgtccccaattcccatcccgagaccgcccgtgtctcatctcgaacttgtggaccccagggaccccagcttcgaccctgagtttctcccytgaaccccagtctcctccgtgtgtctccctcagtatccctaacttcccgagtcaatccatctcttctctttccccgaccctcagtgcctctttaggccccattggccgtcctaattttccttcctgtgctcctctaagtgctcacttgattccccacttcacgtccgtctccacctttcgtggtgcctctactcatttctcactccctgcttctcctgcctttcctccctgctttttttccttgcctttcctctctcgcgtgcctccagacctgcccccgacatgctccctccttcccctcagcctggccaccccagagtctcccacccctaatcctgtgtccacctcctgctcccacagatgacttggaagctggtgacagggagcatgtgaccmgggtgatcatgggactgggtcggggcaagcctgtgggtgtgggacagggagggcacagggcaaggggacctgtggccgtatttttaatgggctacccacatgaccccaacgaatacctccccctagcttctgggtctttccctcacctgcctcttacccgcccaacaggatgtcaggcaggttcggtttggcaacgttgaggctgcacccttgggctgaatgcattgtttttgaatgcattgtttttgttagagtttctgcctggagtttggaacctgttttctgtccaagtytcagtttcctcatctgtgacaggggaactgtacctcctgccctcgtaagtctgccatgaggttcaaaatttgaatgagaaaatgtagaaggtaaagctttataaccagtatggccctgtacaaatacatgattttactgttgggtcataggcagaattgaaaggagtggaaagggaaagggctagaatgagaagacaaggagagaaggatgagcaggaggtcccttgtctttcagtgtatcatttggcagtgtttgttcatcacctcttgtgagtcaggctcttctgtatatgttctcttcaccattcattcagtcatcgtttatctaacaaatatttacggactgtctgatgttctaggctacccttggtgtggccaatgatattctcacttcacatgagaaaaagagggcgcatgagttgcttgaggtcacaccgatgaggttgaagctggaatctgacaccagagcctgtgtgattgtcctgatgtgtaaggtttgctactgtttagracacttcttgttccttccgtggattactttcttgttacatgagagactccccaaaagggagtttccctcttactcagcagaatgacatcactaagagatacagaaaggagaaatttaaatactctgtgtgtgtgtgtgtgtgtgtgtgtgtgtgtgtgtgtgtctgcagacatctattgggtgtgtgtgctgggggaagtaggtaggcaaggagtaaggggccgtagtgaagagtgtgttacaaacttcactttgtagagggtggctccctgggagaatatgttctgtgtctttcacagtggattttgatagggtcatgtcttaaatgcctcttctcgttttcggatggtgatctcatccagtcttatttctttaagtgccgtctctattctgtcagcccacaaatttatatccccagtccagtccagacctttccctggaatgacatactcaaatctagttgcttactcagcacctcaaacttaggcttttcaaacttgaagtatttatttattgatttatttattttttgagacagagtctcactctgtcacccaggctggaatgcaatggcacgatctcggctcactgcaacctccacctcctgattctcctgcctcagcctcccaagtagctgggattacaagcatgcgccatcatgcccaactaatttttgyatttttgtagaggcggggtttcaccgtgttggccaggctggtctcgaactcctgatctcaagtgatccacctgccttggcctcccaaagtggtgggattacaggtgtgagccaccgcgccaggcctcaaacttaagagtttagaattgagctcctgttagttctgccctccatccctgaccccactcttcaccaaaacatgtccctcccactctctttctcatcttaggamataggagtattgttcattcagttgctcaggtcaaagctgtgagattatctatgatgcctctctgtttcttaccccacacccagccagagtgatcttgttaaaatgttgtttctttgcagtggcctctcctctcatggcacatgcctggccccctgttgcctctctgatgtcactggcttccttgcttttcctggaactcgctaaacatgttccagccccatggcctttgcacacgctctctttgcctagctattcatatgactttcatctctctccatcaggtatttatttaagatcaatttcttggtgaagacttctctcctcacccaatctaaaatttcactctccacctcagcacttcctatccccattctctggtttttctcctcagtagttaattgtcatctaaaacctttgtaaatatttacctgtttatcttctttattattagtagctctgtctaaaatataagttccaggatgtcagggattttgtggggttttttttggttggttggttgttttggttttgagacagggtctcactctgttgcccaggctggagcgcagtggtgcgatctcagctcactgcagcctccgcctcctgggtttgagtgattctcccacctcagtctcccaggaagctggaattacaggtgcacgccaccacacccagctaatttttgtattttttggtagagatggggtttcactatgttggccaggccggtcttgaactcttgacctcaagtgatccacccgcctcggcctcccaaagttctgggattactggtgtgagccaccgcgcccggccttgttttgttttaagacagggtctcactgtcgctcaggctggattgcagtggcacaatcacagctcactgcagcctcgacctgctagacttaagcaatccccccacctcagccaccttagtagctgggacttacaggcatgagagataccatgcctgggtaattgttaagtttttgtagaggtgaggtctcactatattacccaggctggtctcaaagtcctgagcttaagtgatcctccttccttggcctcctaaagtgctgggattacaggagtgaactgccgtgcctgaccagtctgttttgtttacgattgtatcctcagcggttagaacaatgcctgccacaatccatctcagtaaatatttgtggagtgagtcataacatgggccacactgtaccgtgccaccagcccaaagatctcttaaagtcacccctgtctcatgtgcttgggagctccagtgacagtttcggggcagtttgcttccagctgtggtccagccaagcsgagtgaatgaaagagaygctttttccttttgtgaaaggacgttttgctctggctcacgtgagcagcagtgcattttgagacgagggccttggcttttggaatctaagagcctgttgagcaagcctcgctcagccaccttctttcagctttctcctgaaggcagtttgaggattaagagcctgatgctctggattccacctaattgggttcagatcctggcaaactgtgtaacctgtgccccagtttcctgtgtaatgtggagagacctggaccttttcttacaggtgtttggagggttaaatgtggcaattcggccgggcgcagtggctcatgcctgtaaccccagcactttgggaggtggaggtgggcggatcaccggaggtcaggagttcaagaccagcctggttaacatggtgaaaccccgtttctactaaaaatacaaaaaattagccgagtgtggtggtgcgcgcctgtaatcccagctagtctggagactgaggcaggagaatcgcttgaacccgggaggcagaggttgcagtgagccaagatcacgccattgcactccagcttgggcaacaagagtgaaactctgtctcaaaaaaaaaaaaaaaaaaaagtggcaatttacccgaaactgtggtgaagcgtctggcgccctgtgggtgctgggcagcagtgggtgctgatggggtgtgaggggatgggatcaagccctttcccactaacttaggaaagaggttggartgagctggggtcagagggaacatttgcggggacattttgccgggaggctgccttggaggttcagaggctcagatgacccctgtgttcattcagtgttttctcacccayrgattgagcacctgctgtgtggccagccctttgcctagtgctgttcaagagtcagaggacataggcaggcaatcccccaccacaacctgccaccccatttcctctcttggggccttgatttctccacatgccaaacagggagaatgattgcaccttccttgtttctttttttttttttttgagacagtctcactytgtcatccaagctttagtgcagtggcatgatctcggctcactgcagcctctgcctctygggttcaaagattctcctgcttcagcctcccaagtagctgtgattataggcacccaccatcacgccaggctaattttttttgtagttttagtagagatggggtttttttctcacacgttggccaggctggtcttgaacttctgacctcaggtgatctgcccatctcaccctcccaaagtgctgggattacaggtgtgagccaccgcgcccggctgygccttccctgtttctttgtgagcttggaggtggatcacaagtgtgaaaccctttgccaaccgtgaggcatggtggccttgtgagaggacggaggccggtgtgtggtggcatgctcccgtgctgkgtggcacagacggagctacaggaaggaagttggggcagcttggcactctgagtgraccctgagtttccagcctgctctgtcttgactgggtgggaggagggtgctcaggasggtgtcactgctgccaggttctgctgccaggaccatccaacagttgttccaatcatgggacatcctgtcgtcagcagctggggctsgtgaggcctgatttccacctcgggcagttctgtgtgtgctcctggaatcccccacgtggccaagcctgtgaggtctgcttcctggcctgctgcctgtgggttcctgtcacgcacctctcgggcagctgtccggctcctctgctctcggcttagtcaagaaggaagcagaaggcttggagtctttcctgcttggactaggagtgagctcagcctaagtgccctgactatatataaagctgaactttccagaccgaagcctggggatggatcagtccgatcacttagggccgctcctgaaggagtgcaggtgctagatacaggttctcccggtggaggagcgaaccccttgtgggccgktagctactggtgggatttgagcatgrtatttccctatccgttgtggagaggagcatggcagctcagagtgggtgggaacagtgtgtggtccctgttatcaccttcaagggaataaagtgtgtctgggggcttcagaggtgctggccccatgggcttataggtggttcattcattcattctcattcattcattcaccaaacttattaaacacccactgtgagtcaggaacatcatgccaggtgcttagggaaacaaatcaaagcgggttgggtgagcagcccaagccaacagatgcacccccattctcacatggtgtgtgttcctgtgggctgggccctgggtggtgtggggtgctggggagaagaggaaggcacaccaggctgcagggcggaggtgcgggtatgaattttcagaggagatggcacctgagctgtatcttcatggataagaagagatttgttcatttgtcctttgtggagcacacattcaggttaagaaagtggggaggatgggctacgcygatggagcgtatgtgtggtatccccaagtgcactgagacacgagtttgacgtgttctgggaagatcgatggtgcggcgtggctggagtagaggtgagggatgagttggaggggtgagttgggccagctctcatggatgctggagtctgggctttccctgggaggtcatggggcgccactggccagggtcagcagggagacctgcagctggatttgcatcgtacagtgggcatggaggggtgtcaggctgggttgggaaccgtgcaggctggaagggcactctggtgctctgagcattcagagggggcagctgggccttgaaggatgagcaggggctccagcaggaactggagagcgcattccagggaggacgcaagtgcaggcccctttcactacagaaaagcagttttcacacagaccttccaaaggggaggagaggggactgcctgggcctggcagctgcggcaggtagcagcmatcagagggcagggaccgctcctcccgtgcctgagacctgcccagggtccttcagggaattcgtagctgaggaggaaccagatttttgggactgagttctccctcaccacccgctctgagccaccctcttggtcccttgtcctctactgcacttcttccsgggcttggctcctcrtcatgagaggagcttccctgggcatggcgaggggcgtgactgacatagcagccctggacaagtggctccrggtgacctgtgttcacgttgatcacagcactaaccacggcccctcctctcrgcaccttcccctctcgagccgtccagtcccagtgaaaatgctcaccgttcatgggtgggctgagcaagcycctgatctctgccttcctccgtgttctgatctgcttcatctgctgtgaaggcctctcgccatttcccccgctggcaaactcctgttcttcctggaaagttcagctaaaaagtcatcccctttaggggtccttccctcaggggaccgtgcacttggcgagacagggactggtcttgggtctctctgttgactgttttatgaacccaggtwgtcacttccagggaactcatcagagatgctaccattggctccaatctccctctgttcccactcgaggttttttgtttcttcgtttgtttttctttctttctttttttttgagacagagtctcgctctcgcccaggctggagtgcagtgacatgatctcggctcactgcaagctccgcctcccgggttcacgccattctcctgcctcagcctcccgaatagctgggactacaggcacccgccaccacgcccagctaattttttttgtatttttagtagagacggggtttcaccatgttagccaggatggtctcaatctcctgatttcgtgatccgcccgccttaacctcccaaagtgctgggattacaggcgtgagccactgcgcccagcccgtttgtttttgttttttggtggacatcaactttaatttgccctttgttttgttttgtttttgaggcagggtcttgctctgtctcccaggctggagtgcartagtgcaatcttggctcactgcagtctcgacctcaagaggatcaagcaatcctcttgccttagcctcccgagtagctgggaccacaggcgcacaccaccatgcccagctaattttattttatattttgtagagacagggttttgccatgttccccaggctggtctcaaattcctgggctcaagcaatccgtctgcctcagcctcccaaaatgctggaattacaggcacgagccactgtgcccggccttaatttgccctttgaacatgtacaattcagggcctctctgggcctcagtttcttgatctctgagatgggaagatgggataataatacttgttcctcccgtccttcagctcctccaggggascctcacaccagcacactctctgtcagtcttccctcaatgaacccagcakgcaagcttggttttgacagaggatgggtgagcagagataaggaaaacggccagaaatatctggcttccctcagcrgrggcaccaaaattggtacctggaaattgcctggcttggacaggcagaattgtcactgtcaacccccaccaccaaaggtcttgggtctttgtctttctgcttgtggtgtttgagagagctgcttgacacagccgaggtgcggtctgtgtcaggtgacctgggcatcctgggggtgcagggagaagcccaggtaaggaggaggaggggccggtcatcagtggggaaaagtgattgtctaccccacgggaaggtcaagggtaggacgctgtgagaagccagggggagagatgaagtgaggcatgatgcggggggccctcatccaccatccccctcttgcagctgtgctgggaagagcctrggctccagggtccaaggtggcagggacagaaggaagcacgtgtgagcactttctccctgctggcccgccttcctggttggcaatgccgtgagtgttccaggatgtggccccgtggctgtcatttcctttcttccacctagtgataacaatggccactgtttgtgygcccacagtcggcctgtgtcccagacaccttccctccattgcgtcatctcgtcctcctgccwaccctgaaggctggatgccagccaagcctgtcgtttctgtggccatgctgtcgtgggtgtgtggggggcatcccctagccccaggctctggtggggggtacacaggctggsccattgacgaaggggtgtgtggaatctttctttgatttcactgcacccctggtgactttctccctcaatctgaggctcatgggtgctggatgctcttgactctctgcccttcctgggmgcacccctccgygtccctgygggcccgtcctcggggtagcctctctgcgctcttccaggccaggcctgagtcccacaggtccccatcttcccggctgcagcccccagaggctcagcctatactgctacttcctttgaaaactataatcgctttacatagcatctggaaaatagggaaaaggaaaaaacaaaagcccataaacccagcaccctcatctactcaatggcatgttttctgtcagtctatcttkgtttgttttctatcaggctttgttttttctatgcataatatttactcagttaaatttttgttttgacaaactttctgtgagccaagcttgtggacggagatgaaaagacgagcagctgcctttgagaaactcagactctgggccagcccatctgggtgccagctttcactgctccacccactagctgggtgaccctgggcccgtgactttacccctctgttctttggtgttctcatatgtaaaatgaggataataatagtaaccagttcatagagtggttgtcagacagaatgattaatgtacgtaaagctttcaggatggtgccagcaagatgcacaggagtgtttggtaggaggatgacgaagcttacmgtctggcaggaggggcagttgtaacatgctgggctgtgatagtacagatgtgtttaaagtgagggagagcccagagcaaggagagagaacctggcatctggtgatggtgtatcaagaacattttaggccagacacggtgactcacacctgtaatcccagcactttgagaggctgaggcaggcagatcgcttgaacccgggcgttcgagaccagcctgagcaacgtggtaagaccctgtctttataatttttttttttttttttctgagacggagtcttcactctgtcacctaggctggagtgcggtggtgctatcttggctcactgcaacctccacctcccgggctcaagtgattctcctgcctcagtctcccaagtagctgggattataggtgcccaccaccatgcccagctaatttttttatatttttagtagagacggagtttcaccatgttggtcaggctggtctcaaattcctgacctcaagtgatctgccctcctcagcctcccagagtgctgggattacgggcatgagccaccatgcctggcctctataaaaattgtttggaagaaattacctaggcctggtgatacacacctgtagtcctagctactcaggaggctgaggtggaaggaggtagaggctgcagtgagccatgattgagccactgtactccagcctgggcaacagagccagacccwgtttcaaaacaacaacaacaaaaacatttttaaggaggaggctgagaaccaygagaaccragcttggatttgaagaaggatcagggctttctcagacagaaaaggagaggaagaacattccagatagacatcattgagagatggcactgagccttgtaatgggacactgcgaacttttcttcagttgttatgatctttttttttttttttttgagacggagtttcgctcttgttgcccaggctggagtgcaatggcgccatctcagctcaccgcaacctccgcctcccaggttcaagcgattcttctgcctcagcctcccaagtagctgggattacaggcatgcgccaccaygcctggctaattttttgtatttttagtagagacggggtttctccatgttggtcaggctggtctcaaactcctgacctcaggtgatccgcccgagtcggcctcccaaagtgctgggattacaggcgtgaaccaccgtgccttgttggtataattattagtattgatcttttttccttttcatgtgcctcttagtgggccccttgcttttgtcttccttctgtccccagggttgatcctgtgctcagcacataggccagggaagaatgtggctgtgacccagtgtccactcagatgtcctctctcccccagggcacccatactctgtccttagtgtcttttgtctggtgacatcttggcacagaggcagagggyggcctccgtctgattggcgcctggctttggtgacagtaccttaggaaggcagtgtattttctgggaacctaggaaataacaaggtatctaattccatcatcaacactggggacaatttccatggcagaaactatgactctgaatatgcagcgtaaagttaccacccagacactgctgctcctgagtctcgaatggcatcttctgcaggggctcccccacctgcccctgcagaaggtgcagttcgttcatttccaaggagcttgcttttgtgtgctgtctctcggagctctttgggaaacctgtggtagcaggaaacaaaggatttagaccaatgccratgatccccttgctccgatagagtgtgacatgatgctggtcaccttttggtatctaggaggggggacattgattttgtttgcggaagtgaaatgatccatgctggcctctttttttttttttttttttgagacagagtcaccctatcgcccaggctggagtgcagtggcgcgatctcagctcactgcaacctctgcctcccgggttcaagtgattctcctgcctcagcttcccgggcagctgggactacaggcgcctgccaccacatctggctaatttttgtatttttagtagaggcagggtttcgccatgttggccaggctggtctcgaatttctgacctcaaatgatccgcccgcctcagcctctcgaagtgctgggattacatgcctgagccactgtgtctggtccatactagcctctttgagtgctgaaaggttatctctgtaacttatttagtgagaaccctccatttgcccagggcattactgcctrtaatgtatgttcacatgtgctatctcctttggtcaataccacacactacaggtgaggaaactgagtctctgctgggacactgggtcaggaagcaggcagttaaggtcacctgtgcacagtggcagcacaggggnacagccttctaggtagccagcctggcctgagggttctgtcacttttacctcccactcagtgttgtttctctttctttccyctcctttyaagatccctccaggcccaggatctggggacaacgctggtggggagtgatctgggtgtctgtgcaggaaaccgctgcactgggtgaratgggcatgggagactgtgcctggctgaccagagacctcgttttcttccagacagagggggaagacggtggggcctccccacctgccccgcagaagatgcagttctttggccgcctggtcaataccttcagtggcgtcaccaacttgttctctaacccattccgggtgaaggaggtggctgtrgccgactacacctcgagtgaccgagttcgggaggaagggcagctgattctgttccagaacactcccaaccgcacctgggactgcgtcctggtcaaccccrggaactcacagagtggattccggtgggtgatgctcagygggaacatacttctctcctttcactcccccacgtctcggattggaggtcttattggccgagaagcagtttctttgagtctctgtctgaggggtctggagaggggtgggagagaggggagactgtactcttggaccagagggaagggcttccgagactccacacttctggcccatcagtgtcccagcacgaggctgaggatggaagcctgggttgtttctggcctggaggctcgacctatatggacaaagggaagaaggaaggacagggagactgagagtgtccacatcagataaggcccatggggagaacctttagccctggctctttatttttggttttggtttttgttttttsagacagtcttgctctgttgcccaggctggagtgcagtggcgcaatctcggctcactgcaacctctgcctcccaggttcaagcgattctcctgcctcagcctcctgagtagctgggattacaggcacccaccaccacgcccagctgatttttgtatttttagcagagacggggtttcatcatattggccaggctggtctcaaactcctgacctcaggtgatctgcccaccttggcctcccaaagtgctgggattgcaggcgtgagccactgcacctggcctagccctggctctttaagggcatggccgttctcataggggctgcccagggtttgcttaggaaggctggacagagctgttgcctcttggggcatgctgggactcccctgggcctgaagrgaaggctcaaaagccaggacaggcctgagggaaccgggccaacggcagagctggttgggaaaaggggagaagcagccaaggttccaaatgcaggccccagcagtgcttggcagactggcatctagttgggctcagacagatatccctgtttccgctcacctatccatctggctgtcctgtcagccatccattcaacatgcaccaagcacctccagtgtctccagagtcctgggcttcgggccagtcctggctggcctgtgagatgacaaacatgtcctgtgtctttaaggaacgtacagtctggtgggggaggtccggtgcaaacaggcgtcatagcaccccttgaggagtgctgtgacagagggagagcctaggaaacagtgtggatcacaaggaggtgattgagagctactctgcgtctggaagagtgaggaggagcctgtgtggcagaacaaaatggataaggtcgttccagccgtgcagargtgtggaggtgtgagcctgcaggcaggtggctctggttggatcccaggtgcatgcagggctttggtgagagtgaggctgaaggaagcagctggggactcattctgactaaagaggcatggcaggaggggtctctgaaagtgtcaggctgggggccaggggctgccaccaacagaagagcaaggcaggtatcagggccccatccaatcaggtgagaattcagagcctggctccacaaggaacctgaggcagaggcacccacagcaggtgcttgggctaaatgcagctcagtggccagtgcaggcaccagttttaatacagtggggccattccagattctgagtgcagatggggctgagcagaccgccttccagctggactcgatcaggactgaccctggayggggcaggcttgcacttgtagctycagagcyccactgcaggcacagctgaccagggcagcrggtccactccttggagagctggacagccccacttttgagrtacacggccctggggataccactaatctccacgtaccaataatcaccaagttctgtcagttgtaaaatcccttgacaggattccagatttgtctcagccagcttaagccccagtgtgggcagacctccatcccaggaggatttagtcctttgtcagcagcttcttagctacacstaagctattctgtggtactttatagtttacaggattttttgttttcttttttttttttttttgagacagagtctcgctctgtcacccaggctggagtacagtgacgcgatctcggcttactgcaagctccgcctcccaggttcacgccattctcctgcctcagcctcccaagtagctgggactacaggcacccgccaccacgcctggctaatattttgtatttttagtagagatggggtttcaccatgttagccaggatggwctcaatctcctgacctcgtgatccgcctgcctcggcctcccaaagtgctgggattacaattttacaggatgtttttaagtatgttgggttagcacattctctgccaatccrtggaggtgggcaaggaaggcagtattccattttatgcatgagaaaatagccttgggatgataagtgattcatcccacttatacacaggaagcagtgaagaaacagaatcagtgtcttctggttcccaattcatttctctgtgctgctgtgttgtttccatgtatgtatgtatgtatttatttttttgagacgttaagtcttgctctgttgcccaggctggagtgcagtggcatgatcttggcttacagcaacctctgcctcctgggttcaagctattcttctgcctcagcctcccgagtagctgagactacaggtgcgtgccaccatacctggctaatttttgtgttttttagtagagacagggtttcactgtgttagccaggatggtcttgaactcctgacctcgtgatctgcctgccttggcctcccaaagtgctgggattacaggcatgagtcaccatgcccggctttgtttgtcttatttctaaattttattgatttatttattttcacagtcatagctctggagtcttttttatcttctcccctctaacctgctcccacccgaacctttccatttcagcagatagcatcattgcaackggctgtgccagatccagccatcacatccacctttccagccaragggagggtggaagggcaggrtgcagaaggtcaatctccccctcctcagggacatttcatggaagttgcacgcattggccagaacccggtcacatggccacagctaactgcaaaggatgctgggaagtgttgcctgtgttgcagacagccamgtgccagtcgaaaatcagaggttctttcyccctccgtcttgctgctggctcgcttctccagaccacagtcrttgtgcacgtgtctcctgctgctccggctgtggcctgcactcctctcatcctcttccaagctgctgtcacagcgctgtttccagagggcaaatctgattggtcactcccctgctttactccccaagggcttcctgttttcttttatttttatttttattttcattttttgagatggagtctcgctctgtcgctcaggctggagtgcagtggcacaatgtcagctcactgcaagatctgcctcctgggttcatgccattctcctgcctcagcctcccaagtagctgggactacaggcgcccgccaccacgcccagttaattttttttgtatttttagtagagacggggtttcaccatctactcttagccaggatggtctcgatctcctgaccttgtgatctgcccgcctcagcctcccaaagtgctgggattacaggagtgagccaccgcgcccggccagcttcctgttttcttaacacatcaggtgcttaatgrcttaaaagggcccagtgtgatcaagtttctgcctctgtrttctcagctcatgccgccttgtgctcctggcctttgcccaggctcttgctgtggcctggaatactcccctttctttgcctgccttccttcctcttgccctcccctgacctgcaggctggattaggagtttctgctgggcatcccatggcacccgtccctgcactggggatcctgctttcctggtaggccacagaccttgtgaggggagggactgtrtctgttgggttcatgacagtgtgcccagcccccagcaggtgcctggcgtagatcaggtttgtggaacaaatgaatgtgatatattaatttagctttagagtattcattgagggctgctgtgtgccaggccctctgtgccacctgggtggagggtggaggactgttgcattgagggcagttgaaggagtgagctgggaagtgggaggtggaggatggggactgggatgcagggtttgaggttatcaggggtcccagaagcagtaatgccaaggcctaggctgtgacctggagtgagggctgcgatggggtggggtggggtcgaggctgtggaggagggtcatcagggcactgctggagccctggggttctccagggccgggggtggtcattgcagtgttctcccagctcctctcaacaccctgcggtctgtggagagcaggcctggtgcactggacttgcctctggccaggrctgagtttctgccttctaaacgatcttcctcctgtgttgccctagaggcctctggactgtcctgagtacttgacgcgtgttagagtgagcrtgggctgctagccttccgctccaggtggaggagtttctgttgttcttttgctgctgttgctgcagtgagctgccaggctgagcttctggatggacctgggggatggaattaggagcttctgaattcttgggttgtataacctaaggccggagagtcccacagcactgctgctgggcggagagactggaccctgctgatacagacagcgacagcagcaggagcatctgcagtttcccagcaggtcctgcatgcctgggcttggcactagtctaagtagtaactcatgttatcctcacgacagtcccacgaggtggggtcattactgacctcctattacagatgaggaaacagaggcttgcagaatttgagatcacacagctggtcagcgtagcgattattcagaccctgtcacctggctccagaacccactcgtttacctttcttacatcagggctgctttgtagtgtggcgagctgagtggagctccacccgcctgggctgatcctggcccttcctgcctgacctatggtgcgggggccctggctctccccgtgtgagcccccaggggtcacttgtaatatgcctgtgtacactatgatagcatagatacttctgttcctggtacagattaatcatttacggctggcattgacttgtaacagatgacatttgatgaaatcaaccagcctctcactggtatctcagcagaaacagggctgtacctcccaggcatcctgggaaggatgatagaagtgtgtgatctgtgcttccctaccgggagctgacttttgaggctctctggactgggactttgccataaaactgcttatcagaaacctcagataagtggagtgccctgtgtcctggccacgtactctggggccagctcctccatccattcagtcctcccacatcccatcttcaccaagcagagtggaaagcggcaggtctctgcgagaaaaggaggctctgtacccagccttcagtgagataactttagagtggggccttgtattccctacacaggccttgtccccgacacggcctctttgcccttgcttctccttctgctaagaatgctccttcccaactccttggctggacacacggctcctgctctgtgggcctgtcctgttcccactcagagcctcagcaccccccatgtggccaagacacagcccctcttgccttaggttgccgtgggtctgtttccacatctgtttcccctccagactgcagggctcctgagggacagggcctggggccaagtctcctctgcgttcctgatgcctggtgktgtgccacgctctccgtgggtgcacggtaaatatctgcygagtggctagatgtatccatggttgctgaaggccaagtgtgttgaccagagggcgtgggaaaggctccactggggtggctggggtagagatagaccttaaggggtccagaagactccaccagctggagggaaaggccctacagagacaaggtactaggaaaggcccagaggacagaggaggggccctgtggggagcctgtgggcaggaagggcctgtgctgggctttgaaactggggactcaggtactgctctagcgtgagggtccttggcattttttttggtccaggaccccctgaggtccctggggaatgagaacaggctcacacagccactttcaagaggtttgcaggtcccctgaggcttagccacagacccctcccaccccagcagagacacagcagaggcttctgagtggaggccaggtggcttcagcctggggttctagaagggagggaagagacacacccccgtgtgtcctccagagcctcagccttctccctgaatctcccctttgcctcctcactgtaacccacacctggctctccttgaaggacccgcttgccccgcagcctcctgagagttttctctcccagtccctctcccactgggcctggaggtggggtagggtcctccttgcccccagccttgaatcttctgtcaccctacaataccacttgctgtcaccccggtgataggtatctacgagcctggggtgctcccccacatcctcaaagatgtgagcccctgactcagcgttgcctctggttcctgaccctccacattcacatgaccacgcgctggcctttatcatcgccagtgacagcagctctcccgtaaatacaagtttcaagcaccccactttccagtctctgccttctgtctttccagttcattccctctagtcctccacccacacagtgcttttccccattgacagggaattgctccyggccgcttttcccagccccatcccgttcatgtgccttgctttgtacccagcatggactccatggcctgtcattgtcactccttcacctatacttcctgcctccttgcttctctctctcttcgtcatcctggcatcaccaccccagaactgcttggtttcagttctccaccatggctaggggaacatacctttttgctgactgctctcactttctttttttttttttttcttttttttttttttgacacagagtctcgctctgttgcccaggctggagtgcagtggcacactctcagctcactgcaacctccacctccggggttcaagcagttctctctgcctcagcctcctgagtagctggtattataggcacccgccaccacacccggctaatttttgtattttttttagtacagacagggttttgccatggtggccaggctggtcttgaactcctgacctcaggtgatatgcctgccttggcctcccaaagtgctgggattacaggcatgaaccaccctgcccggccctattgctctcactttgaaatcacgacatgagccacagtgagcctatgatgtggtttgacgtctttctgcatttctctgttcacccctctcccagaaggcatgcctccytccctcccctcagcctgcagccccttcccctccacgcttactctcagctgatagccctgctgctgtctcgctgagaaaatagaaatagccagaggagaattccctctaccccatgcacacacctctgtccccgcctactccacattccctgttgtcagcaccgatgtgtttagctgagggtggtccccccattcaaggccatcatctcctgtcatctacttcttgacaccatttgaacaattatctcccctctttcctacataacactttccccttttctactatatattttttgctatggattgaawgtatccccccgaaatcatatgttgaagccccaatccctcgtgtgatggtattaggaggtagagcactatgggggtgattaggtcatgaggatggagccctcatgaatgggattagtgcccttagacgaagaggcaagaaagagatgatctgtctctgccatgtgagggcacaacgagaagatagccrtctgcaaaccaggaagtgaaccctcatcaggarctctatcagccagcaccttgatcatagacttcctagcctctagaactgtgagaaataaaggttgtttaagcctcccagtctgtagttttctgttataatgtcctgacctaagttattttccatcgctatacaatgggttatttttttctttaaaaaaaaattatttcttgactctactttttcctccagagactgcttatattccactgtcttcattcttctcctcctgttttctctctttaaacttttcaaaaatagcaaaatataacacatatagagaaaatgatatacagctcagtgatttatcacaaacacctgtgtaaccaccactcgamtctagagataggacattacagcaccccagaagccctccttttgtcccctcttcccaaagaagggtaaccaataacttgccttttatgataaaggctttttttttttgagatggagtctcactstgttgcccaggttggagtgcggtggcgcaatctctgcttactgcaagctctgcctcctgggttcacgccattctcctgcctcagcctcctgagtagctgggactacaggtgcccgccaccamgcccggctaattttttgtattttagtagagacgaggtttcaccgtgttagccaggatggtcttgatctcctgacctcgtgatccacctgcctcagcctcccaaagtgctgggattacaggcgtgagccaccgcccccggccaagataaaggcttttctatctggcttctttgttagmattttgttggcgagattgatacgttttgtgtgcagctgtctgtcattttcattgcaatagaattccattgtctactatatcacagttactcattctactactgatgaaaatttgggttatttctagtttttttggtgcatacatgcatacatttctggtagacatacctagaagtgaactggctgcattatgggccataacttgtcttcaacgttagtaaataataccgcccgtctgttttccaagcagcagtaaatggcactttctgttacttcatatcttctgttacttggtactgtcaggttttaaaattttagtcattctgtcgggtgtctagtagtatgttattgtggttttattttgcatttgcctgattgcaaatgaagttgagcactttttgatacagtgattaaccatttggatatcctcttcagtgaagtatcagctcaattctcttgactatttaaaaaataaagttgtttatctttttcttacagagttttaggaggagttttttggtacatgtgcagtccaaatacacaccttttgtcagtgatacgtgttcagctgcacacacggtgttttgcctttttattcttttaatggtatctattgataaacatgagttcttwgttttaatgaagtcaaatttgttcatcttctttacggtgtactttttgtgtcttgtttaaggaagtccttctctatcttaaagctttgagaagcattccttctttctcctattttctaaaaattgttgaagatctccttccttccttccttccttccttccttccttcctttcatctatctctctctcacccaggccaaacttcagtggcatgatcatggctcactgcagcctcaacttcccaggctcaagtgatcctcctgcctcagcctcctgagtagccaggactacaggcacgcaccaccatacctggctaattttaaaaattttttgtagagacacggtctcatcaagttacccaggctggtcttgaactcctgggctcaaacaatcctcccacctcagcctcccaaagtgctgggattacaggcatgagtcacatgtctagcctgtattctttctttcttaaatgtttggaagaattcatgggtaaaaccatgtgaccctggagtttatttgtgggaagcttttaaaacatggattcgatttctttaacaaatataggactatgagattttcatctcatgtcggtttgggtatgttgtgttttcaaggaatttttctattttatcgaagttgtcaaatttgtctgcaggtccccttatttcctttttaatgtatggaggatctgaagggatggtactttgtgttktctctatttcttgtttggttttgctagtgatttgccaatttaaaaaatctttccaaagaaccaacttttggctttgtttattttttgaaaacctgagtagctgggattacaggcgcccaccaccacacccggctaattttttttatttttagtagaggtggggtttcaccatattggccaggctggtctcgaactcctgacctcagatgatccacccgcctcggcctcccaaagtgctgggattacaagtgtgagccagtgtgcctggcaagccgctttttaaatggcaccaatcccattcatgagggcagagccctgatgatcgaattacctcctaatggccccatttcttaatactatcacactgagaattaagttttaacataagaattttaggaagacacaaacattcagaccatggaacatatataaaacagttgtcctaccaactaacagaatacacattcttttcaagaacacctatataaaaattatagacactgacctatgctggccataaagcaaatatgaacaaatttcagatacctgaagagatttagactatgttctccaactacagtgcaattaagctagaaatcaatagcaaaaatgtaactataaatgagcccgtatgtttgaattttaagcaagatatatgtaaattatctatggttcaaaaaagaagtcacagtgaaatttagaaaatatcttgacgtggcgggttgcagtggctcacgcctgtaatcccagcactgtgggaggccaaggcgggtggatcacctgaggtaaggagtttgagaccagcctggccaacatggtgaaaccctgtctctactaaaaatacaaaacattagccaggcgtggtggtgggcacctgtggtcacagctacttgggaggctgaagcgggagaatcacttgaacccgggaggcagaggttgcagtgagccgagattgcaccactgcactccagcctgggcaacatgagtgaaacttcatctcaaaaaaaaaaaaaaaagaaaagaaaaagaaaatatcttgacccaatgatgatgcaaatactacgtatcaaacttgtaggatgaacttccacttctggccatgacagaggagcctgtatcagactagccttcctatttatatatttatttttgagatggggtgtcgctctgttgcccaggctggagtgcggtggtgcaatctcagctcactgcaacctccacctcctgagttcaagtaattctcctgtcccagccttccaagtagctggaattacaggcgcccaccaccacacccagctagttttttatatttttagtagagacggggtttcaccatgttggccaggctggtctcgacacctgacctcaggtgatccacctgcccctgcctcccaaagtgccgggattacaggtgtgagccactgcgcctggccgtgagtgacctttttaatgtgttgttgaatttgatttgctggtattttgttgagaagttttgcatcaatatccatcagggatactggcctgtagttttctttttttatatgtctttgtctggttttggtgtcagggcaatactggcctcatagaatgagtttggaagttttctctcctctgtttttcataatagtttgagtagggttggtattagtttttgtttaaatgtttggtaaaattaagcagtgaagccactgggtcccaggcttttctttgctgggagacttttcattacagctttgatctcattacttgttattggtctatttaggttttggatttcttcacggttccatcttggtaggttgtgtatgcctaggaatttatccatttcttctagggttttcaatttattggcatataattgttcacagtaacctctaataatcctttgagtttctgtgatattggttgtaatatctcttttgtcatttctgatttttttgtttgggttttctctctttttttgttagtctagttaaagatttattgattttgtttatcttttcaaaaaactttattttgttgatcttttgtattgttttrtttcaatttcatttatttctgctatgatctttattatttcttttcttctactaattttgggtttggtttgctcttttctagttctttaagagacatcattagattattttgaagtttttctacttacttgatgtaggtgcttataggtacaactttcctcttagtacttctttccctgtatctcacaggttttgatatgttgtgtttccattatcatttgtttcaggatgtttttaaatttccttcttaatttcttcattgaccattcaagagcatattatttcatttccatgtgttcrtatggtgtgcaaaataccttgtttttgatttgtagttttatttcattgtgatcacagaagatacttgatatgatttcaaatttaaaaagtaatttggctgggagaagtggctcatgcttgtaatcccagcgctttgggaggccgaggcaggcagatcacgaggtcaggagatcgagaccatcctggctaacacagtgaaaccccgtctctactaaaaatacaaaaaattagccaggcatggtggcaggtgcctgtagtcccagctactcaggaggctgaggcaggagaatggtgtgaacccgggaggcagagctggtagtgagccgagatcgcgccgctgcactccagcctgggtgacagagcaagactctgtctcaaaaaaaaaataataacaataataataatttaagacttgttttgtggcctaccatatggtctatccttgagaatgatccatatgctgaggagaagaatgtgtattctgcagccgttggatgaaatgttctgtaaatatctaataggttcatctgatctatactgcagactaaggctggtgtttctttgttgattttctgtctggatgaactgtctaatgctgaaagtggagtattgaagtctccagctattattgtattgaggtctatctctctctttagctctaagaatacttcctttatatatctgggtgttccagtgttgagtgcatatgtatttaaaattgttacattatcttgctgaattgacccttttatataatgaccttctttgtctctttttatagtttttgtcttgaagtctgttttgcctcatagaatagcatagctattcctgctcttatttggtttccatttgcatggaatatctttctccatccctttagtttcagtctatgtgtgtctttacaggtaaagtgtgtttcatgtaggcaacagatcactgggtcttgtttttctatccgttctgccactctgtgtcttttgattggagagtttagtccatttatgttcaatgttattactgacaagtaaggacttactcctgccactttattaattattttcttgttgctttgtgatcttctttctttccttcctgttctccttttagtgaaggtgattttctctggtggtatgttttaatttcttgctttttatttttttgtgtgtatctgctgtatgttttttgatttgaggttaacatgaggcttgcaaataatatcttataacctaatattttaaactgatgacaccttaacactgattgcataaacagacaaacaagcaaagagaaaactaataaaaactctacattttaactttgtccccccactttttaacttattgtactgtttatgtctgaaaagttgtagttattatttttgattggttcctcttttagtctttctactcaagatatgagtggtctacatatgacagtgttataatattctatatgtttctgtgtacttgctattaccattaagttctgtactttcaagtgatttcttattgctcattaatgtccttttctttcagattgaaaaactccctttagcatttagcagtatgtgaactgcatttttcaagtccagaatttctgcttgattcttttttttttttttgagatggagtcttgctctgtcgcccaggctggagtgcagtggcgcgatttccgctcactgcaagctctgcctcccgggttcacaccattcttctgcctcagcctcccgagtagctgggattacaggcgcccgccaccacgcctggctaattttttgtatttttagtagagatgggatttcaccatgttagccaggatagtctcgatctcctgaccttgtgatccgcctgccttggccttccgaagtgctgggattacaggcgtgagccactgtgcccagcctgcttgattcttttaaattatttcaatctctttgctaagtttatctgttaggattctgaattccttctctgtgttagcttgaatttcactgagttccctcaaaacagctattttgaattctctgtctgaaaggtcacatatctctgtctctccagaattggccactggtaccttaattagttcatttggtgaggtcatgttttcctgtatggtcttgatgcttgtgatgttcgtcagtgtctgggcattgaagttaggtatttattgtagtctttgcagtctgggcttgtttgtatctgttcttcttaggaagactttccaggtaataaaagggacttgggtattgtgatctaagtttttggtcactgcagccatatctgcattagggggcaccccaagcctactaatactatggctcttgcagactcgtaaaggtaccacttgggtggtcttggataagatctggaagaattctctggattaccaggcagaggctcttgttctcttcccttactttctcccctaaaagtggagtctctctctctgtgctgggccgcctggagctaggagaggggtgacacaggcacctctgtggccactatcactaggactatgctggctcagacctgaagccagcacagcactgggtctcacccaaggcctacagtctccactgcctggctactgcctacgtttgcttaaggcactagggctctacagtcagcaggtggtgaagccagtgagattatgtccttcccttcaaggcagcaagttcccccyacccccatcctgggaaggtccttagatgccatctgggaggcagggcctgcagtcagaaaccttagtaatctccccagtgctctattctattacagcctggctgatacccaagccataaggcaaagtccttcctgctcttccctcccctttccacaagcagagaagtctctctccatggccaccactgccccagccctgtggcartgctgccaggccrctgccaaygttcattcagggcctaagggctcttgaagcaactgaacactgccaggcctgggactctccctttagggtagtgggctcccctctgacccagggcaggtccagaactgccaccccacagccaacacttagaatctgggaccccaagagccctcttggtgctctgccacactgtagctgagctggtacctaggctgatttttgctttttatgaaggtacttttttgtgtgtatagttcaatttggttttcctccagggaggacaattggtggaggtttctatttgggcatcttttttttttttttttgagacggagttttgctctttcacccaggctggagtgcagtggcgcgatctcggctcactgcaacctctgcctcctgggttcaagcgattctccagcctcagcctccccagtagctgggattacaggtgcctgccaccatgcttggctactttttttttcaattaaaaagtaaactttaatgtcgaaaatgcaaacttggggaaggcagaaagatcacacacaaggctgtcgcttcacacttggaaggttgcacggcggccaggagaggcactcctcacttcccagacagggcgggggccgggcagaggcgctcctcacttgccagacggggcggcggccacatgcctggctaatttttgtatttttagtagggacggggattctccgtgttggccaggctggtctcaaactcctgacttcaggtgatccacgcacctcggcctcccaaagtgctgggattacaggcatgagccaccgcgcccagccctatttggccatcttgctttgcctccaccttcatttgataacagaacacccccatgtaaccaccaccacaatcaagatataagacatttctgttattctccaaatttccttcaccctcctttatagtccatggcacccaccccatccctgggcaacacctatgtgcttccttttttttttwccsygcaggagkacgtcttcctatacctatgtgcattccatcactgctgcttttaatcatatagcgtgtagtcttatgagtctgactttttcacttagcataatgcttttgcaatttgtgattgagcgttktcatatgattctgttttttctgtctcttagcttggaagttatacactttttagtagtaactgttgggagatcgttctccaagagtctctctcatatttccatacatcctgctagcagagacattgactacctgtttttgtctgtttagtgttgctataaaggaatacctaagtctgagtattatacatagaaaagaggttttatttgtctcatggctcctcaggccatacaagaaacatggwgccagcatcttacyagtgtcacatggcaagaaaggaagtgaggaagagaawataagttgttaactggttgttaaaaagtgccaggcmcgggccaggcacagtggctcgtgcctgtaatcccagcactttgggtggccaaggcgagtggatcacctgaggtcgggagttttgagaccagcctgaccaacatggagaaaccctgtctctactaaaaaaaatacaaaaaaattagctgggcatggtggtgcatgcctgtaatcctagctactcgggaggctgaggcaggagaatttcttgaatccaggaggtggaggttgcagtgagccaagatcacctgggcgacaagagcgaaactctgtctcaaagaaaaaaaaagtgccaggctctttttaacaaccagttcttacaggaactaatagagtgaaaactcactcacccccaccccacagggagggcattcattcatgagggatccacccctatgacccaaacacctcccattagccccccacctccaacattggaatcaaaatttaacatgaggtttggggggcagaaatccaaattatagcactacctttgttccaggctaccttcaaaggatgtttatacagcaaacagccttggaaaatagagttagggtctccttgtagagcacagggtaagtttgcttacttttcagcataatcaagattgtgtcttcttctggagcaaaactttgacaacaacaagcggggcaaagtctgaaaccttttgcacatcttgacagaaccttagagattacgagatttatctctgccttactcaaggtccattagtatcttccagaacaataagttggtcttagaatcctttagctatgtattcccttccaggcttcgatgctgtgtgctgttgttttatttagtttttattttaaacccaacaagacgctataccatcaatacttatttagatccccccacatatttaacttgccatggtgcttcattctttcatgcctctttaagcatccatctaggatcgtgttcattccacatgaagagaaagcttttggcccagcaygatggctcacacctgtaatcccagcactttgggaagcctaggcgggaggatcgcttgagcccaggatttccagaccagcctgggctacgtggcaaaaccctgtctctactgaaaatacaaaaaattagccaggtgtggtggtkcacgtccctgctactcgggaggctgaggtgggaggattacttaaacctgggaggttgaggctgcagtgagcgttgattgcaccactgcactccagcgtgggtgacaggagtgagaycatgtctccaaaaaaaaaaaagaaggaaagaaaaagcttttgtatttcctttcgtgtaggtctgctaatgacaaagtctctgggttttttgtttgactagagaaatrttttaattttaaccttattcttgaaggttttgtttttgttttcattttgttttgtgtgctaagtacagaattctcattggcatttatttatttagagacagagtcttgctctgtggcccaggctagagtacagtggcacgatctccgcctcccagkttcaagcgattctcctccctcarcctcctgagtagctggggctacaggcatgcaccactacacctgactaatttttgtatttttagtagagacggggtttcaccgtgttgcccaggctgatctcaaactcctgagctcaagtgatttgcctgccttggcctcccaaagtgctgggattataggcatgagccgccgtgcctggccagcatttattttcttttcagctctttaaggaagtcattccattatctctgggttccattgttgagaagccagctgtcattctaatggttgccctttgaagataacttttttycctctgctattttaaatatttcctccttgtattttattttcaacaggtgtaatgtggcacatatatcagcaattgttatgttacatacaatacatattgtgcaacatatgtatcattatcagttattgctgtgtaacaaactactccagaacacagtggcttataaaaggaatcatttatttagtccttaaatctgcaatttgagcagagctcagtgggaaagcctcagctttactttatatggcaccatataaggtaactcgcaactggcaagttggtgctggctgttggctggtagttcattcagggctcagggcccaggaccaagagtcgtcaccatggcttgcttcagcctccttgaggcatgatggctgggtcccaagagaagagaaatagaaacttccagtctcttaaggcattggtctggaagctgggacggcatcacttttgccatattctgttggtaacgcagttacatcgccagattaaagggtaaagagatacaaattcccactgctcagtgcaaggaatatcagtgattttagggggccctgttttaaaacccctacaaggtgctaagcrtggatttctggggctttcttgttttttgtttttttctatgtgtttttttttttttttttggtggtggggtcagggagggcttatrgggtatgttaaatcagcagaataattttatttatttatttggagatggagtttcactcttttgcctaagctggagtgaagtagcgtgatcrgagatggagtttcactcttttgcctaagctggagtgaagtagcgtgatctcggctcactgcaacctccgccccgctggttcaagcaattcccctgccttagcctcccaagtagctgggattataggcacccacygccacgcccggctaatttttatatttttagtagacatggggtttcgccatggctagtctggaattcctgacctcaggtgatccacccaccttggcctcccaaagtggtgggattacaggtatgagccactgtgcctgacctataatgttttttaaaaatcagttttggaaagtttgcagacattaactyttcaaatgtagcttccatttgattctttttctactctgcctctgatcctccacttatgtatgtatgctagatcttttattagatagtctgtgtctcttatgtactctactatattttgtattcttctgtctctccatgctttattctgtttactctttcctgattatattttttaattttgtaatttccatttgatgcttttttgatcattcaaaactcttcaccaaaattctaaatttccttttttaacctctcgaatgttatcacagttactttaaagtctattttggataacttaaatatttacagtcccctcacagatatgtttcttttgtatattgtttctgttggttttctttcatgtcttatctccacatatgcctggtgagttttgattatgtgttggtcattgtatttgcaagtatgctcgtagaaataatctggaatggccgggcgcagtggctcatgcctgtaatcccagcactttgggaggctgaggcaggtggatcacgagatcaggagatcaagaccatcctggctaacatggtgaaaccccrtctctactaaaaatacaaaaaattagctgagcatggtggcacgttcctgtaatccctgctactcgggaggctgaggcaggagaatcacttgaaccaggaggcagaggttgcagtgagccgagatcacgccactgcactccagcctgggtgacagagcgagactccgtctcaaaaaaaaaaaaaaaaaaaaaaaagaaataatctagagcctagtttgatgtttccttacaaagaatgaatttatttttgcttctcccattgcaactaggataacctcagtctagtttctggaactgaaatcacttgaggctgaactgtggtctctgtgagagcgtgtctgtgtatggctcacccttattcctaggctacgtagttctttaggaccctaacccaaagtaagagatgttcatcagggctctcctcttggcagacgcctgggctccagtccctgtgtcctgagccccatgaggctgttactggtgctgctcgtctgcccatcctctccagtaacagccacctgaacactgcaattcctgggtttccatcattccttccagcctggtgagtcatcagtgtcttttgaggtatccagtgcctgccagcagatgttttttaataatttgtccagcatttctggctgtcctcagtaggtggtctgtttcacattccctagtctgctgttaatggaaagtggaagttctgagagagaatcatcgttcccgtcagcattcaaatgcctgattacactttccccattcgctaycctttcctttatttgctcctcaccacagcaaaactcctcaaaaatatctatctttgcaatcttcagattctcacatbgtgtccttaaacccactttaatcaggccttggttccctccattccactaaaagtaatgttgtcaaggtcgtgcatgcctccgtgatgctaattccagtgatgagttttcagttgtcattctctgacatatcggcaacacttgatgtggagtaccctgatgttgagaggctggtgagatgaaggaaaaacccagccaagggcaatgaggaatggcttccttccgcctcctccttccctatctttgttgtggtttttkttgtttctgtaacactgattacgttatagtttatttaatgtacttccttattctatgtttttactttagtcattttgttgatctcctccataataacataggctcgggccaagcacagtggctcacgcctgtaatcccagcactttgggagaccaagatgggtggatcacttgaggtgaggagttcgagaccagcctggccaacatggcgaaaccctgtgcctactaaaaatacaaaaattagctgggcgtggtagcaagcgcctgtaatcccagctactagggaggctgaagcaggagaattgcaggagaatcacttgaacccagggggcagaggttgcagtgagctgagatcgcgccactgcactccagcctgggtaacagagtgagactctgtctcaaaaaaaaaaaaaaaaaaaaggcttcaggagggcagagcattttatgcaattgttcattaattgacccctccatttggcacagatcacatgcccagtagttaactgttaatcracgcactctctgtggaacaacaggctggtcccgttgagccaacactctctgggcactgccttcactagactctggctggctgctgcgcttgtagaggtatgcaagacaaaaccttttggtatgttaaaagccctggtcagaactttaagtaaccatcactgacatrtaatggttatggttttgaaagtgcttttatagtggtttttcatctgtcctcacagcacctctgggaggtaggtaggacaggtacagttagtctcatgtttcaaatggggctcagagagggaaaaggatttcccaagatcacacagcaccttagtagcaaaacttggactcaacctcaacacttaaaaatgaacaaagctggccgggcgcagtggctcatgcctgtaatcctagcactttgggaggcccaggcaggcaggtcacctgaggccaggagtttaagatcagcctggccaacatgacaaaactctgtctcttctaaaaatacaaaaaattagccgggcatggtggcgggtgcctgtaatcccagctactcaggaggctgaggcaggagaatcacttgaacctgggagatggaggctgcagtgagccgagatcgtgccattgtactccagcctgggcaacaagaatgaaactccatctcaaaaaaaaaaaaaagaaaagaaaagaaaaagaaaagtttccctttttttaaatatctcattttaatgactgcataatagtttattacatagttataccataatttatataatattttgttgctgtacatttaggttaaacaatacttacttagttcctactatgaagaggggccaagtactcgaggctggrgctctcacatgtggcaatgaaattagaaagtggatatggcagggctgtggtaaaataaaatataaaaataataaatgatattaccaaagaaaaggaaagtttttcaaaataaargaaaatctagacaagcatagtggctcacacctgtaatcccagtacttttggaggctgaggcaggaggaacacttgaggccaggagttcaagaccagcctgggcaacatagcaagaccccctgtcaacaaaaataaaaaaaaattaggccaggyacagtggctcacggtggctagtgcctgaaatcctagcactttgagaggctgaggggggtggattgcctgagctcaggagttcgagaccagcctgggcaacatggccaaaccccatctctactaaaaacacaaaaaattagccaggtgtggcagcacacgcctttaatcccagctactctggagactgaggtaggagaattgcttgaacccgggaggtgaaggtcgcagtgaggtgagattacaacactgcactccagcctgggtgacaaaatgagactctatctcaaaaaaaaaaaaaattagctgggcatggtggtgcatgcctgtaatcccagctactcaggaactaaggtaggaggatcccttcagcccaggaattcgaagatgcagtgagtcatgatcacaccaccgcaccccagcctgggttacagagcaagaccttgtctctaaaaaacaaagaaagtctaacctaaacgccattatgtcatttacatgtgtataggggtgtgtgtgtgtgtgtgtgtgtgtgtgtgtgtgtgtgtgtgtgtgtgtgtttgcttgggaggggagtcgggctggagctggccaggccgcagcctggggaccttctgattccagcagggatgtgggccgagggtcccgccttactcatttcgggtcttgctcctctgtcctggctctacagactcttccagctggagttggaggctgacgccctagtgaatttccatcagtattcttcccagctgctacccttctatgagagctcccctcaggtcctgcacactgaggtcctgcagcacctgaccgacctcatccgtaaccaccccagctggtcagtggcccacctggctgtggagctagggatccgcgagtgcttccatcacagccgtatcatcaggtgagcaagggaacaagaccatttggacaacgtgtgtgtacctgcttgtgtgggcagtgggggccgcaggcctcggttcccctccatagtttgacttaaaaaggagcagggcctggcatggtcgctcactaacgcagtcccagcactttgggaggctgaggagggaggatcacttgagrctaggagttcaagaccagcctggcaaaatagcaagaccttgtctctacgaaaaaattaaaaaattagcatgtgtctatactcctagctacttgggatgctgaggcaggaggattgcttgagcccaggagttagagtttacagtgagctatgattgcaccactgcacttcagcctgggtgacagaatgagaccttgtctctaggaaaaaaaaaaaaaaaaaaaaaaaggtgctgcgttgctaccagattaaaatgtaagaaggacaatgtaatgtttccagagtccggagtgctcaccaggtgccaggtctgtgggagctgatttctacccaccatgaaattgaattttcccaacccccacaaggtatcgtcattttattttactttattttattttattttattttattttattttattttattttatgttacgttatgttattttattttgagacggagtcttattctgtcacccaggctggagtgcagtggcgcgatcttggctcactgcaccctctgcctcctgggttcaggtgattctcctgcctcagcctccggaatagctgggattacagtaatgtgccatcatgcccgggtaattktttttttttttttttttttttttgagacggagtctcrctctgtcgcccaggctggagtgcagtggcgcgatctcggctcactgcaagctccgcctcccgggttcacgccattctcctgcctcagcctcccgcgtagctgggactacaggcgcccgccaccacgcccggctaatttttttgtgttttttagtagagacggggtttcaccatgttggccaggttggtctcgaactcctaacctcaggtgatctgccctccttggcctcccaaagtgccgggattacaggcgtgagccaccatgcccggcccaggtatcatcattctagagagagctaacaggacttgtgcaggtcactcagccagagagggtgaaagaggggcttggatccttggtgtctgcccaggctgctcttctggaagctgaaggcctccttttgtgaatccattcagccagcagatggagcagctgttgcccctggtgagggcactgtccccacccttgcacagggcaccagttggccatcttgtgcagaggtagccacacctcctctgagtctctatcctagatagctcagttaagctcccaggcccagaactcaaaacctcactgctggccgggcgtggtggctcacacctgtaatcccagcactttgtgaggccgaggygggtgtatcacttgaggtcaggagtttgagaccagcctggccaacgtggtgaaaccccgtctctactaaaaatacaaaaaattagcaaggcgtggtggcgcacgcctgtaatcccagctactcgggaggctgaggcaggagaattgcttgaacccagaggcggaggttgcagtgagccgagattgtgtcactgcattacagcctgggcaacaagagtgaaactccacctcaaaaaaacaaaacaaaacaaaaaccctcactgcactttagtttccaggcgtgcttttggacagcactgtctcatctcaccatcactctgtccatttcctggggcaggcacagcagcttgtgtcgataaggatattgacgcccagaaaggttaagtgaattgccygaggctagtgagatatccgtgttctgtgaccctttcctgtgccaccaccctgcccacttcctgctggtgtggccctggggcccatctcttgtacgagtgagcaaactgaacagaaacctgatacaggtcacatcagatataattacattcaaatcagcccaactagctgagtggcgggaatgctcttgagctcaaataaaccagaaagtccgagtttccgagtgcacttccctgcatgtgcacttaggtccccctgccaccttgtaccacacctgctcacctctgctcaccctggccctctcctgcagctgtgccaattgcgcggagaacgaggagggctgcacacccctgcacctggcctgccgcaagggtgatggggagatcctggtggagctggtgcagtactgccacactcagatggatgtcaccgactacaagggagagaccgtcttccattatgctgtccagggtgacaattctcaggtgctgcaggtgagcagggggaggggcagggtgactkgtactgatacctcccggtgtccacrgttccctttgggcccctnggctcaggtgtcactctcaggcctctcactgtcccccattggtccttgaggcctgagctccttcatggagggtgcagacccctccctggctcttccctcccagcccttttccaggagccacgtcctcartctctttgcttgataaacctggggacggcctccaacccagcaaaataaaccccaaraaaggcccagctccagtcagttagttcagttccrcttttcctgagcacaaactgtgagccagatgcctgcctggaggggctcgtgggccagcgggacctgggcttaaccttttgcaagcttgtccaatctgtggccctgcaggctgcatgcagcccaggacggctttgaatgtggcccaacacaaattcacaaactttcttaaaacattatgagatccatgcatggaccttttttttagatcagctgttgttagcgttcatgtattttatgtgtgacccaagacaattcttctgatgtggcccagggaggccaaaatattggacaaccctattttacaggaattcaaaccaagcaaaccaaactgtctccagttcctgtaggcatttgtgccagaggccctcctgttaacgtttttgattacctgggcaaaagatgtgattttttaattgtgggcaagcagatggggtgatactattaaatagctatttcatatattagattgaacagaaaaggcaggatgttggattatgttttattgtctagaattagaaaattcttctaaagatcatgttctctctgccttggcatcagaatgcaactacgttatascagaaaatgtggattcctttttttttttttttttttttttttttgagacagagtttccctatgtctcccaggctagagtgcagtggtgcgatctcggctcactgcaacctccacctcctgggttsaagtgatgctcgtgcctcagcttcctgagtagctgggattacaggcatgtgccaccatgcctgggtagtttccgtatttttagtagggatggggttttgccatgttgcccaggctggtctccaactcctggccttaagtgatccacctgcctcagcctcccaaaatgccgggattacaggtgtgagccactgtgcccggcccagaaaatgtggattcatatcttatgcttcttgctctcagggaagggaattctccacccactgttgaactccactttcaccgagaatcctctgcgcacccagcatggtgccgcgcagaccctgcctccatgcgggggtgtgcacacccgcttctcgatagtcatgcacgactgcagctgtcctttatccggtgctgattggtgcctgaccttgaactgagtgttgtatgtgttccagttaattcttagaatacactcatggggtggaggtcattattcccctttcctctccgaagaaactgaggttcagtgttgttaattaagaagcgtgcccagggagggccacaaagctgagagagtggggcttgaccttacattggcctcgatgccagccctttgctcttcctgctgtgtctctggcctgccttcargtccagtgggactgctgtgaggtgaccctggtgtcacatgggtacactgtggttgtaatgaacctcatggggacagcactgagccaaaagtgagacagtaaaaccctcctagcactttcttttttttgagacagcatctagctctgtcgcccaggctggagtgcagtggtgtgattgtggctcactgcagcctcaacctcctggactcaggtgatcctcccacctcagcctcctgagcagctgggactacaggctcgtgccaccacatgggctaattttttttttttttgagacggagtcttgctctgtcgcccaggctggagtgcagtgscgcgatcttggctcactgcaagctctgcctcccgggttcatgccatyctcctgcctcagcctccagagtagctgggactacaggcgcccgccaccacacccggctaattttttttgtatttttagtagagacagggtttcaccgtgttcgccaggatggtcttggtctcctgaccttgtgatccgcctgcctcggcctcccaaagtgctgggattacaggcgtgagccaccacacccaggccacgccagctaatttttaaaatttttttggtaaagatggggtctccctatgttgccsaggctggtatcacactcttggtctcaagtgatcctctcacctcccagtgtgttggaattacaagcatgagccactgcgcctggcccctggctctctttttaatactgctgttctttcattgaaaacatagtacctgcatgtagaaaaaaatcagtcaggacagaatgaaaagcaagaatcattcccacctggacccccagtgcccatcctgagatacagctaccttttaagttccttgactcagaaatgtttcatgtgagccacagtcatgccaggtcgaccccttccctcccatccacactggcacttggctttcctggtgcttctctttacgttctttttttttagacagagtttttgctctattgcccaggctasagtgcaatgatgcartctcagctcactgcaacctctgcctcctgggttcaagcgattctctttcctcaggttcctgagtagctgggattacaggtgcctgccaccatgcccggctaatttttgtatcgttagaagagacgacatttcaccatgttggccaggctggtctcaaactcttgacctcaggtgatccacccaccttggcctcccaaagtgctaggattacaggcatgagccactgcgcccggcctctttacgttcttatcagcatcctatggagtcaaacttcccttcctctttcatcagctccttggaaggaacgcagtggctggcctgaaccaggtgaataaccaagggctgaccccgctgcacctggcctgccagctggggaagcaggagatggtccgcgtgctgctgctgtgcaatgctcggtgcaacatcatgggccccaacggctaccccatccactcggccatgaagttctctcagaaggggtaagacctcctcccctccccatctgctggcctgytgggctcyagctctcctgtcacctgtcccgtgcctgaggcaagcagtatccaccatagatcttagcatctccagcctcagagcagaggccccgggttcacaagcctcattaggccccgcctggcccaaagaaggtgctccatcattgtatcatgggtaggaatctcggttcacaagttcagctgtgcaaggaggagactttaaaatttttctggctgggcgcggtgtctcacgcctgtaatcccaacactttgggaggctgaggtgggcagatcacctgaggtcgggagttcgagaccagcctgaccaacatgaagaaaccccatctctactaaaaaatacaaaattagctgggcgtggtgacacatgcctgtaatcccagctacttggaaggctgaggcaggagaatcggttgaacccgggaggcggaggttgcagtgagccgagatcgcaccgttgcactccagcctgggcaataagagcgaaactgtctcaaaaaataaataaataaataaataaataaataaataaaaataaatttatttaatgtaccttaattcctaggagtgaatctccctctataaaactggagacaaccaatcttagccctctttggggtctcctctttccagctcccctccaggtggtgctccagttctggagtctgatgcaaccccaaggcccacctggcccctcctctaacccagcccagcctgatctgaacagccccccgatggcttcagtgctccttggtttcttgtgtgcccagctcaaagcctgggaaatgcttggtaaggtggccgagtgcccgtccacctagatgcctctttcctttctggctggtggcacgttgggaggcaggtacaggctcatgttttgggagcctgggaacccctggtgtcaggaaaattgtcttcaaaggggtaggggatgagataaaaagataaatgaatatctcaaatctcaaaatactatctaggccaggcgcggtggctcacacctgtaatcccagcagtttgggaggccaaggtgggtggatcacctgaagtcaggagttcgagaccagcctgaccaatatggtgaaaccctgtctctactaaaaatacaaaaattagccaggtgtggtggtgtgtgcctgtagtcccagctactcaggaggctgagacaggagaattgtttgaaactgggaggcagaggttgcagtgattcgagattgtgccacagcactccagccagggcgacagaacaagactccatctcaagaaaaaaaatactatctaacaggaacaacatctagaatgaatgaatgagccaatgagtccttcgatcctggcactgtgctaaagcaccagcctcaccgaaatgaataagccactccaggacaggagacaccccagccacccagaatctcatagcgcagtgccagacaagcagtgagaaggcatggrcgggcagcactcaggcagggaggctggcacttgtgcctgtcctcaggttgttccttcctctgggagctgcatccaccttgctagccccatggggcattgctagcccttctaagggctggaccaagcctggacaaaccctcctttccttgaatctcccaagcacagccagaatgagctagagctttcagaaatacttgaccaaacagagaagataccaacacccccagccccgcagtcaggttccccatttgcaggttgtgacctgagtggacaccaggtgatgctcttctctacccaragggctggcacatggccccactcttgcttgtctccagccaccctgagctgtactgggcaggagctgtaattgaccagttttctctctcttcaaacaacctcagccctcaccggtccctctgtccccacacaggccatcctgggtgggtccagcgtcccatcacrtaagaggatctttgcacagaagacaaaggaagaggctcctaccttgagtggagcagggagatcccttatcgacwtggcagccagcacagccctactccaagaatcccacggcctcagtgttactgacaagtggttccctcacagctcagactaggagctccctcgctgtttttctttttcttttcttttctttgttttgtttttgagacagagtttcactcygtcacccaggctggagtgcaatggcatgatcttggctcactgcaacctctgcctcccaggttcaactgattctcctgcctcagcctcccarggagctgggattacaggtgtgcgccactatgcccagctaatttttgtatttttagtagagatggggtttcrtcatgttgaccaggctagtcttgaactcctgacctcaggtgatctacttgcctcgccctcccaacatgctgggattacaggcgtgagccaccgcgcctggccacctctgctgtttttcaatgcagctgacctttcccacaaagctcggtttgtgcctgcggttctcagatggttaagcccctgctgaggaagggaaacagataatcccagacagtgagatggaggctgagactgaggatgcctgggggctgcactaggagctcagagacggcatcaggcagctggagttcagggaaggtttgggggcagcagagcccgagccaagccatggacactagccggagctggccactcgggtgaagacttggggggctccagagggcccagggaaagaagctgggcctgactccatgtgcctagtgctgagcaccaagcgctggcataagggctgtagggagctgggcagcataaatcctgggcctgtgctgggcacccctaataatagagaacagcagctgaacactaacgctgtcccagccaccggcttagccttcatgtgggctatttcactrtagcccagagagctgatgtattttattccccctctaaagctgagggccaagtgtggtggctcatgcctctaatcccagcactttgggaggctgaggcaggaggatcgcttgagcctaggagtttgaggctacagtgagctatgatcatgccattgccctccagcctgggtgacaaagggaaatcctgtctcaaacaaacaaacaaaaaacagatgaggaaaccagggcttagagagattaagtaatttgctcaaagtcaggcagtcagtaagtgccagacctgggaattaaacccatgtgggctgtcctagtaattgcactaaaaaaaaaaaaaaaaaaaagctttattgagatatagttcctattccatacaatccacctattgaaagtatacaatgattctgatatattatgtttattttttccaactgtgatagattatatataacataaaatttgccattttaaccacttttgttttttgtttttgagacagagtttcgctctcgttgctcaggctggagtgcaatggtgtgatctcggcttaccgttacctccacctcccgggttcaagtgattctcctgcctcagcctcccgagtagtagctgggattacaggcatgcaccaccatgcccagttaattttgtattttttagtagagacagggtttctccatgttggtcaggctggtctcgaactcccgacctcaggtgatccacccaccttggcctcccaaagtgctgggattacaggcgtgagccaccacacccggcccattttaaccacttttaagtgtacaattcggtggttttaatcacatttacaatgttgtccaaccattacccctttctaaaacttttcttatcacctcaaacagaaactgtaaccattaataactcccgattctcccctccccacagcccccgataagtcccatatcctctctgtctctcagaacttgcctgttctagaacctcgtatcagtgaaatcatacagcgtttgtccttttgtgcctggcttatttcacttagcatgatgtcttcaaggctcatccatgttgcagcacgtatcagaatttcctttctttttaaggcagaatactattttgtttatccattcagtccttcactgatagacgcctgggttgtttccaccttttgtctgttgtgaagaatgctgctgtgtacatgggtctgcaaatgtccattcaagtccctgcattccgtcctttgatacttccgacctcaggtgatccgcctgcctcagcctcccaaagtgttgggattacaggcgtgagacaccgcgcccagccagaaaaattttaaagtcttctccttgcacagctgaacttgtgaaccgagattcctacccatgatacaatgatggagcactttctttgggccaggcggggcctaatgaggcttgtgaacccggggcctctgctctgaggctggagatgctaagatctctggtggacactgcttgcctcaggcaccgagtagaaagcaattgtgctctttcccactctgtcatactgcttcctatagcatgcaggtcactgtgtgactcactgacagtgtggtaaggaggtggagggtggctgtgtgccaggcacagaactgggctctgaaatgcctggtcttccttacaccccagccactcctctcagcactctctccatgttgctcagcttctggaggccaccagtgaggaagctggggcttgacttcaagcccatctgactctaaagccagtaccagggagggtgatcattgctggtggcagcatcaggaaggcttcctggaggagggggttagttgtgccttgaggggctcagtacagccttaaccatggtgagtgtgctggttgggtttgctgaactttgtttgcagtgatgctctctgtaagcagtagatgaagctccaagtcctggcttcatcccacgccacgcagaccctagcttctgctcaccaaccggggcccctctctcaccaggtgtgcggagatgatcatcagcatggacagcagccagatccacagcaaagacccccgttacggagccagccccctccactgggccaagaacgcagaggtgagtggatcctgaggtgggtgggtggggcagggggcygggccccgcaggtcctcagggccctcaggaagcaggttcccgagaggaccctgaggctagcacttgggggctgaccttgcagtgggtgtgcaggcagagaagtccatgaagagctgggatcctggcagggctctgctgctctctggctgggcggggggatccgccctgtgcctcagtttcctcatccatgaattctgctttggcgatgtgatgaagtcagcaaggcagtgtgtgacaaaactcggcacaaattgtaaagtgcttcccaaatagaaggtggcgtgatgatgattgtattattagtcaggattctctagagggccagaactaacaggagatatatatatagagagagaggggggtttatttttttattttattttttttgagacggagtctcgctctgtcgcccaggctggagtgcagtggcacaatcttggctcactgcaagctctgcctcccaggttcatgccattctcctgcctcagcctccygagtagctgggactacaggcgcccgccaccacacccggctaatttttttgtatttttagtagagacgaggtttcaccgtgttagccaggatggtctcgatctcctgacctcgtgatctgcctgccttggcctcccaaagtgctgggattataggcgtgagccaccgtgcctggcctaaagggggatttattaaggagcattaactcacacgatcacaaggtcccacaataggccatcgcaagctgaggagcaaggaagccagtccaagtcccagagctgaaggacttggagtctgatgtttgagggcaggaagcatccagcacgggagaaagatgtaggctgggaggctaagccagtctagccttttcacatttttttctgcctgctttatattctggcygtgctggcagctgattagatggtgcccacccagattaagggtaggtctgccttcccctactgactcaaatgttaatctccgttagcagcaccctctcagacacacccagggtcaatactttacatccttcaatccaatcaagttgacactcattattaaccatcaagatgatgatgatgatgatggatgatgatggtggtggtggtggtgctgggcctagctgcacacacagggagcctggctgggcatctcctctgagttcttcccctaagctaagctctgtcctcctgggaggatggaggcctctggtctcatcaccaggaagcacagcttgacagagaatgggatgccccagagttcatggcctacttctcaatgtgatgggccaggagggagggcactgccagcctcagggtacctctgcattccaggagccggacaccgagtcaggcccttccgtgtaggtttggtcactcattgtcatcacatgctgtgaggtggggacttgcattcccatcttcacagaagccctgaagtgcacatggctacagtgacccatccmagcgcaggcagctgggatgagtgaagctgggctttgggctcaggtctgtgactccaaagccaggctcccctccctgttcccaaggctctgccagggatgtgcattgccaaggcccagtgagaggtgatacctttgcagggttccagggagggatgcagggagcggggtgcttcaggacaggccccagaggagcctttgcaaggagagtgggttctgttggcactaggaaaggaccagaagcctcttaaaacagtcagcacatctttggctttttgtccctagtcttgggatgctgatgggatgggaggcagtctaggcccccctagaactggggcctgcccctggaatcctcttgctagygctttccaacatcccagtacctgtaggcctctcagagcagaagtggcagtgcccacgtgtcccggggtgcggcagctccccgagtgcctgtgctaactcagcctgaccgtctcccgcagatggcccgcatgctgctgaaacggggctgcaacgtgaacagcaccagctccgcggggaacacrgccctgcacgtggcggtgatgcgcaaccgcttcgactgtgccatagtgctgctgacccacggggccaacrcggatgcccgcggagagcacggcaacaccccgctgcacctggccatgtcggtgagcccaggaccgcgtgtcctgccctgtggggccccggtgggaatgcaggagggctgtccggactggagccctcctccccactgtctccctcctatcgtcagctgctccaaatcatcttcccacccaaagctcagttcagaccctgactcctccctcaggaagccttccaagtccccctctcagcccaaaataacaccacctcctgtgtgctgtggtaccttttccacctgtgcccccatttggcacttgcatggcacgagagggaaaaatgacagctctggccatagactggccctgagcaagccatgtcacctgtcagcctcgatttcctcatctggaaaatggtggtgtcaatacttatctggaagagttgtggaaaagttatggtggacacttggtcaccctctacagaatgtctaagtgacacacgcagtacctggcccgagtgagcatcctgcttcccttcactggtccgcgtgttgctctcatcttccctgggaggctgtaagatcctggcaggcaaagcctgagtgtgcagcccagcagcctgtggcaggtgccaggcatattcgttggtttattatagaacacagttcctgccctcaaagcccttactgtctggttacacatctagagtatgaacatattaaacctagcagaggaggacgttactgtgttacagacatatgtgtgtgcatgtattcttttttttcgagatggagtctcgcactgtcgcccaggctggagtgcagtggcgcgatctcggctcaccacaacctccgcctcccaggttcaagcgattctcctgcctcagcctcccaagtagctgggactgcaggcacgtgccaccatgcccagctaatttttgtatttttagtagagacggggtttcaccacgttggccaggctggtctcgaactcctgtgttggccaggctggtctcaaactcctgacctcatgatccacccgccttggcaccccaaagtgctgggattacaggcgtgagccaccgcgccccaccgtgtgcacgttttctatagcaataccgtatgtacagaagtctgtttactgagtctcagtgacagaacatgagagacccccgggactctaaaagctgattcaggacacattcagagacatcctgttttataccaaaggtcaaaacttggaagagatgttgttgcccaaaaggctgaaactataaatagtttcatttttgaaactgtggacatttttagcactgggtgggcccttggaatgatctaactcagcagttctcaagttttttggcctatttgatccctttatactctgaaaaattattgaggatcacaaagattttttaatcatctggattttctttatctatatttaccattttagaaatttaaagtgtgaaaatttcaaaatattaattcatttaaaaataacaataataaatatatatgcctactatgtacccacaaaaattaaaattaaaawttttttaaaaaacttaaaaaataactggccagctgcagtggctcgtgtacaccagcactttgggaggccaagatggtcagatcacctgaggccaggagttcgagaccagcctggccaacatggcgaaagcccatctctactaaaaatgcaaaattagctgggtgtgagacctctgaaagggtatcacgtgttcacaggggtccccaggtcttactttaagaactgctgatagactttggtcatcttcatcccatcttcacagtttttggcatattcatcaaccacctttacaattatgtacttaatcacctcttcaaattggcttacttttatttatttattttgagacagagtttcgcttttgttgcccaggctggagtgcaatggcacgatcttggctcaccgcaacctctgcctcctgggttcaagcgattctcctgcctcagcttcccgagtagctgggattacgttcatgcgccaccacacctggctaattttgtatttttagtagagacggggtttctccatgttggtcaggctggtcttgaactcctgacctcaggtgttccacctgcctcagcctcccaaactgctgggattacaagcgtgagccaccgtgcccggcctggcttacttttaaactgacttaaatttattttgagagaaatgttgcatcactaccataaatggccatccatccatccagtgccaaccataaaaggtaaccaatgcagggcgcggtggctcacgcctgtaatcccagcattttgggaggccgaggtgggcgaatcacgaggtcaggagttcaagaccagcctggccaacatggtgaaaccctgtctctactaaaaatacaaaaaattagctgggcgtagtggtgggcacctgtaataccagctactctggaggctgaggcaggagaattgcttgaactcggtaggtagaggttgcagtgagctgagatcacgccactgcactccagcctgggtgacagagtgagactccgtctcaaaaaaaacaaaacaaaacagtaacaacaacaaaaaatcacagttaatgctgaaaacacacacatatctgtagccatagaagtcctaatagaatgtgaagaactgtttggaaaaccccattctagacccacagcttcattctctaggcagggaaatcgggtcccaagaagaggaaggtgacaaggccagagcccacagttccaggtggccagtgtgtcctctgaaaccatgccatgctctgcgcccctgcccggcctccaggtgtggaaatgtgtgacgttcttcgtggggacactcccccgaaggctgccattaggggcacgtgtgttcggttacccctcagggatgacaccctggactgggtgggcaagatggccttccctgccctcacccaccctctccttgctactcctgaaagccatcagcagctgacctactgtgtccccatggctcctgggtcggggtcacagatgcactgcatctttggaggcggagctggcagagcaggggcgagtcacttctagtttctgcctgggttcttacaccctcccctgtgggtgcttttaagcctgtttgtcaggtccccagccatcaaatggcagactttggactaccagattgacttgggtgggggtgaggagggttccagtgtctccccgtgctgaggagaggcccgctgggtgagttgacaggttggggctggcagccaggggcccctttgttcttcacttccccggcagttgcacgtcttatcctctctccatctccaacagaaagacaaygtggagatgatcaaggccctcatcgtgttcggagcagaagtggacaccccgaatgactttggggagactcctacattcctagcctccaaaatcggcagacgtatgtgctctgcactctggggctggagtggggtgagggttgggtggatacagggaccgaggaggagggaagtcccaggcatcaggtgccagcatcctgtgctgacccgccctgctcagagctgccaggagcacctcgtactcagagagggggcttccttacccaagcacaagggccctgagcagtagatgcaggcccaccacggggcttgctataccagcatcctctcccgtgcagcgccccccacctcagggagctaagattcccagcaggggtggggacaggagagccagcagcagccttctttccccaccgttggggrattcactgatggaaccactggctagaatgaccaagggtgcatgcactacactgcacgagctctgggcatgcctgtgtgggcagagtgcatggccatgtgctgcacgctcgcacagtgagccttagcttcagagctggacagagcagatcctcctcaccagaggcctggagcccgctctggagggtttcagcagctgtgggggtcactgtgggcaggtacctgatggcagcagtgtgtgtgtgccagtgcacacgtgtgtgtctgcatgcaccgcatctatgacctccttttcagcaatcccatccatcaaatggagtaggtgccccctggctggctcattagtccctttggaaccctgaactatcacttagcatttttgagaatcactgaatgtggccatgggattcctgctttcttggctggagtagaaggaaagaaggggttcccacaggcatcgggcagggtgacactgacctcctcctcccatatcctccttccctggccttaggaagctgcttgggatgtaccagcctgggggcagcactccctgtcagggtgggctgaggcctctggagcagcccacgtgcccagggcctgggagctgggacaggggacggagtgtggaaaggaggggcctctcctttgcatgttgacatcatttctgatcctgtgccatctccccttccccaaaccatgacaagttgtcaccaggaaggcgatcttgactctgctgagaaccgtgggggccgaatactgcttcccacccatccacggggtccccgcggagcagggctctgcagcgccacatcatcccttctccctggaaagagctcagcccccaccgatcagcctaaacaacctaggtaggcctcgcctcccgactccctcttctccagctggttcccaggcccctggatcacagcaggccccaccaaagcaacaggatccctaggacggaagtcactaaaggaagccggggaggatggggccggagttgtcagcctctaggcagccagcaacccacagatcccagaggcctagggtgtccctggctgatgtcccatgctccgttgcccctgagaggatgtgtcctgcacacagtctcaggcctgggcatttccagtggcacccatgaggtggctgctgttactgccctcctgtccccagggcgttcagggtgggcagtgaggagtgctgtcgggggactgggggcccgggccctctggcttcacctgtccctctggcttcacctctatcacactgtttgaatctcggttgggcctgagacctgtgtgcccccttcctggccccgtggtgactttcagacgttgaatgtggccaggcagccagcatctgccccggtgcattccttggtgcccagggagacatccccagactagacaggacccttctctggactttctgtgggctggcccactcagggacctccattgtttgggagcggggtcccctgaacagagggcagccaggagccagkccttggtgagccagacttcactgtggaggcggcagcaccttcagccagggtagcccgaccaagcctggaactctggagaggcaccgtgactgtggcttctagtcctggctccacctctctctcccctcccaggaactccccctccacctcccatctttatctctcaattttgcaggcagtcacccaagccaggccggatggtgggcctggggtgcggcgtcagatgggtaacgccctgggcctggagaggccaccgagcctagccatgcggcattagctctagctctcactccctaatccgtccttcttagctgcgcacacaccacacgccccctcccctgcaccctgtccccggcctctctcagccactcttctgcttcccttgttcactgtgsagccgtgtgccctggggagggggagacaccgcttygcagccctcggttctgctttgctgcttctagactctgcacagtggtggggggctgtcagagttggggtcacgcgggctgctgcaccaggcacctggggactgggctgcttgtcaggaggggcagctagtcagttgggtggacgtcrggcaggccttggacacaaaggaagacatggacagagtggatggtgggcctgatcccggaggccactgggatttccagacctgggatcaggacgagggatgtctcctttcatccatggacttaaaccccgaggaacgtcctgactcagccttttgactaaatgaccttgggtgaattayggaccctcttagagcctcacctgtcaatagggaataagaattcttaggccccaggtggttattgcagcatcggctccgatgcaagaagaagcactttgtctgaagaggacacgcaagggtattcatgccttggggtttcaagaggaagagattgaggggaacctgggagctggctgggcagggtggggagcccttcccagagcagtgggcccccctttccactccagcccatttctctcctgtggcctgtggctcagctttctcctgggacagagtccttcctgtggggaagggacagatgacagggggagtggggggatgagggcgtggccgtgggygaggcacagcccaggtttgatctagggacctctggggtagcagggcttggggacccacctgaccacagcatgccctgctctgtgcctcacagaactacaggatctcatgcacatctcacgggcccggaagccagcgttcatcctgggctccatgagggacgagaagcggacgtaagtggatcgagatcgggggcagagcggggaacgtgtgcgctttcctgcccctcacccaccccctgttgtgggctcagggctttactctctgcaccctcacagccggcgaagtggctctgctcctagtcttatagttctcagcagagacagaacatggagagcctgtgtcgctcgttcattaatgctgggcggtgcaggctctggagaccagcccagggtgccaggcttcttggacttggtggggctggcgcagtgttctggcctccctccctgatctccttatggctagaagagggggagatgcctgggtcccccctggggagatctcagcagctgcttcccactgctcctactggcttccttaaccacctcccactgcagaatagtggcgtgggctgccttccccagcacctgctgtatacctagtcccattgtaagaggcgggcctgggtgacaggatgcaaagagaagacgcccaggccttgcccttcaggcataatcccgggtgcttgaactcagtgccagctggcacggcaaggtaccaggacaaatgcgtttccagccactgtgctgtcgccacctcccttgattgctgcagttgattcatttattctttattagtctctcatgttcctaatagccttcccagggaggaatttgtaaccttgttttacagatgcagaacctgagcccctgagaggtgaagtgacttgctcaaggtcacacggagtgagtgtcagggtggcaactcacagccgggtcttccgaacccacgtcctttgtgctaccgcaggctctctctgggttctctgtggactctatacctagtgccagccctctgcagggaaagctctcttctcagaatcagaggcagctccactcccagggccaggcagtgatcgtgcagctctgtgggtcctctcacttcgcactcacttccatgctaccctgttgtgtgccctggaggttcccctgccccatcagcattccctcccctgtgccccctgcatgctcttgcacgcgggcacacgcacacacacacgcacacatgcacgcacacacacccacatgcacatgcctgcgggttgcccacatgcatgtgttgcccacatgcaaacacatggacacgcacacacatgcacacatgcaaacacacgtgcatgcacacacatacacatgcgcacacatacacatgcatgcatgcacatggacacccacacacatgcacacacatgtacacacatgcatgtacatacacacacctgtgcaggggctgaggtgaggcagctgcacctgagggggggacccacatttcccaagggaggaaaagcagattccccagattctggagcctcagaaccctgcctggagcggggctgaggcaagagtcaggagacccctcggtagctccccacttgggccttccaagctacagagccctgcgccctctgggttgatctctgtcgccagccccgcatcttcgggagtttgctttggcctccagcaacagtgtagtctctcccctgccacctctaggcttgctgtggggctgggtacctggtccaggaaaagacccctagaggtgggacccgggcctcctccatttatcagccctcttgggcacctcctgcatccccttgacacacagcgctgcccagagcagaggcggcttctgccctggtggagcttccaggtcagcgcaggagagagtaaaagaaagattgcgaatggaatggaagcagcctccaccaggaagcaggtggagcagcaggcgggctgtgagggagggtctcgatggcatcagggcaggcttctctcagcttcatcaagctgagatgggaagatgagaagatcagaggaaggttccagactgaaccaaccacaaaggcattcccccagggcatggccaatgaggacaggcaggatgtggggagacgtgtcagggcgcgctggagagcatgtgactcaggaggcggcagacctgggtccaggtccagtccgcatccatatgacttggttcccgtcacctaacctctgagctacactccctccgtcactcaaaaatatgcacagagagtaggcgcagtggctcctgcctgtagtcccagctactcgggaggatcacttgagctcagaaggttgaggctgccgtgaactgtgattgcaccaccacacaccagcctgggtgacagagtgagaccctgtctctataaataaataaataaataaataaggctgggcacggtggctcgtgcctgtaatcccagcactttgggaggccgagacaggcggatcacatgaggtcgggagttcaagaccagcctggccaacatggagaaaccccgtctctattaaaaatacaaaattagctgggtgtggtggcgggcacctgtgatcccagctactcgggaggttgaggcaggagaatcgtttgaacccgggaggcagaggttgcggtgagccgagatcgcgttattgcactccagcctgggcaacaagagtgaaactccgtctctaaataaataagcacagggatgtcagggagggtctgcctcagaggcgtttgggacaatgacatgagctaatgctggtagcacccctcccatagcccctggcatgaacctctcccttcctccctgccccctcctcccctgcttcttccaccttgtgtggaggccctgatactctgtcactgcccattcctggcctggctgtagggtccccgcccctccttccccagccttatttaattccaacagactttatcaggcacctgctttggatcaggcctgatactgaccaaaatcaggtgtcccaagttggggagactggccgagatcctgctgggatggcgcctggtcrgtgatgctatcccccgaccttcctttccctttctctgttgcactctccagcccctgaaatactagacatttgttcctttactgccctcacccccaccctcgctgtcctgcataggacagaagttcctcgggtccgtctgggtctgtctgccaggacacagctgcaggggacaagggcnatgagggtggatgtaaagtactgggctgtggcaggaccctcctctctcccactgctgttcccactgcagccacgaccacctgctgtgcctggatggaggaggagtgaaaggcctcatcatcatccagctcctcatcgccatcgagaaggcctcgggtgtggccaccaaggacctgtttgactgggtggcgggcaccagcactggaggcatcctggccctggccattctgcacagtgagggcggcccctggggatggggccaggcggggctgagacctgtgtcctcaaggggccgagtttgtcttcagggctttgcaaaaagagagtggaggagtagaggagggctataagcactttgaggaggcaggggcggggctgcaggtgctgaggtcccaggctggaaggagaagggctgggcccatgggcttgggtttggggatcccccgccctctggccacagagggtagagctggctgtgtgaaattttggcataggaagcgtttcctatcgactgccttaacccctcctcccctcacccctgcaaagcaggcaccaggggccacacagcctgctgcacataaggaatcccattcccagggtgcacrcagcaggcagtctcaggaatgaggagccactgagcctcaggatgccagagccctcgcctgcacacttcattttactgggaaattttactgggaaattaagttcccaggtggggagggatgacgtgaagtcacatagctcatccatggggtcgctgggctggagcacagtcccctagactcccagcctggcacctcctaggccacagggcactgtgtagtctcctttcactgccgctttgcgaaggcgcctggcttgctggacagatagccgggtggtcagtgttgtgacggctcctctgtggagctgtctgagcttctaggtgctgacaggtggggaggggcactgccagatcagggtcctcagctccccscaaccccctggacattgtcctgggactcaacatgtctgactggtgcccctgcccctgtgctggtcagattccattttctccagagcgcccccacatctggatcctggtcatgcaaagtcttggaggtgccmggggaggactccccaccctagggtgggtatcagggcctgtgggccaggcctrtgttggatgctggggatgcagagctgagccaggcataccccagcctcaggagcagggggctcagccagtccaggaggtgctggggacagagtcycatgggcrgaggaggagagtcatctgtcaagttgccgggacgttagtgtccacggcggtttattgactggtatttcatttccttttgatgattctcaccatagccctgcggggtgagcagatggggaaactgagaaccagagaggatcagccagtgaattgggcagtcaggactgggtctccagcagtgtgcccagctctctmccccagcctcagggtcccagcatcccctctctggtcttccacagggtccaagggcgggcacgaggtctgagcaggcagactgggcagagtcctagcttcttctccaaaagggccacgtccttcttcagggaccatttcttccccatccggggtcttgagactcccaggggccatggaggggatttgagaggtctcctggctgatcctccggtgtgggcagatggcctcctttcagctaccctctgcttgtacatccctggccctggggaactcactgcctcacgggggaagtggggcagcttctccttcctggaggtgcagccggccccttggccctgtctgttctgaaggctcaaaggacagggctattccttgttttctgtgacaaacaacgtgggtctagcttttataagcttttactcttgaggggctcttctttaaggaaaataatacaaaatcatgaatacaagatgargtgcagagccgtggggcttcagtggtttttgagtctctccgttgcccaggctggagtgcagtggtgcatcttggctcactgcaacctccgctcccgggttcaagcgattctcctgcctctcagcctcccgagtagctgggactacaggcgcccgccaccacacctggcgaatttttgtatttttaatagacggggtttcaccrtgttgggcaggctggtctcaaactcctgacctcaagtgatccacctgcctcagcctcccaaagtgctgggattacaggcgcgagccaccatgtccagccggaaggaggtttctctctgtctgtctgggaggttgcaaaggaagggcccagaatttgggtttgcttaggcctcggtaaacccgcttcctcctgccacctcctgcgttcaggcgctctgcaggctgttctacgggagccctgcgtgtggccgctgcatctccccgcctctgacccctttgttcctaggtaagtccatggcctacatgcgcggcatgtactttcgcatgaaggatgaggtgttccggggctccaggccctacgagtcggggcccctggaggagttcctgaagcgggagtttggggagcacaccaagatgacggacgtcaggaaacccaagtaagccctggcgcactggggccgtggccgcagctgtgcccactgtggctgttccctggggacagagggctccctgtcctgctgagggagggggaagagcgccccacgcttgaggggagcagagggaacccccttcccagggaggcagagggctggggtgtggctctcacttgggcatgcagacacctgctgagcgcaggaggggcgtggcctggtgggcctggctctgccctgcctggctctgccctgcccggctctgccctgccggctctgccctgcctggctctgccctgcccggccaggggtctggggcttgcctggagagagcctgggccacccttctctgagaccacctgggcagaggctgggtttttgctgcccaggcaaaaggaacccactggcctttcaaatgacacggctaaacattttctcacatttcagacagcactcgctcccaggatcggactactaggttataatcagagggcttcagtcttacctttaatttaaggcctacaagacttgaactaatttaagtcagactgaaggagaaagtcacatttccaggaaacatttgtttgggaagcccaaatcctaggactaagcaatgcatcccgttcggggctggatgaatggtgtgttccaagaggagtgttttgagcatttctgagtgattttttcatattttgaaagtgagtgtcccccagtcttaggggcccggcatcccctctgcggtcttccctagggtccaaggccagggaccttcaatcttttttcccactctgtggcttgtctttctgctctgtggtgtttctaggtttttgttttttgttttttgttttggttttggttttggtggcccatgttcttaatgaggtagataatatttataaatatttttcttcttgtagtttgtgattttttcctttctttctttcttttttttgaaacagggtcttgctgtggggcccatgctggagtatattgctgtgaacacggcttactgcagcctcgacctcctgggttcaagcagtcctcccatctcagccgcctgagtgcctgggactactagcatgtgccaacacatgtattttttgtagagatggggtttcaccatgttgtccaggctagtcttgaactcctgagctgaggcgatcctcccgccttggyttcccattacaggcatcagccaccatgcccagcctagtttgtgctttttatttctcgttcataaacccctttgctgcccccaagcagcacacgattctcctgtgtcgagctggaaagctctctagatctgccttttacattgaggtcttttatcaacctggaattgatttttgtatgagggtgaaatccaagatccaatttaatgttttccacgtgattggccaatttttcccagccccatctgtgaagtctgtccttccctccgcttcctcagcagtgggtcaagcatccctctgctcttggatctgctccaggctgtgttttgttccactggttggaaagctgtctctgtgcccggaccacagagcataaaaaactaccgctgtgtggtgagtcctggtgtctgggtggcagatcctccaccttggccttcttcaaaaacatcatggctattcttgggggcagtagagagaagtggatacaagcatagaccctgaagtttctacctcttctcaaaaataggaatatgccaggcatggtggctcaagcctgtaatcccagctctttgggaggctgaggcaggaggatcacttgaggccaggaggtcgagaccagcctgggcaacatagtgagaccctcatctctacaaaaaatttaaaactaacaattagctgggcatggtggcactatggctgtagtcccagctaattgagaggctgaggtgggaggatcacttgagccccggaggctgaggctacagtgggctgtgatcccatcactgcactccagcctgggcaatagagtgagaccctgtcttaagacaaaaaaaaaaaaacaaaaacaaacaaactcacaaactataaaaagaaaaaatatttataaattctactccattaagaacatgggtccatccaaataaataaataaaacaaaaacaccataaagggagtaaaaagacaagccacagagtgggagaaaagatttcgaatccatacatccatcaaaggactcattttcaaaatatgaaaagatcattcagaaatgctcaaaatagtaaccaccattttactttctcttcctatgagtttaactgctccaggtactgttaagtaaaatttttaggggataattgatttggaccaggattctgtaccaggcccaacagaagaaacsaatatggagtcattcatgccaagtgaacctagttagcttaggcgtatacccatgtaacaaatagctgagttctggttagctacaacagctaagctttaatcaatcatagatggccacctgattcaaacaaggcaaaccaattaagctccacacctcactttggttttcagcccatcaacactgcctgaccacgttgcaggccagagttctttgaacctattctggttttgtggcctgcctgactctcagttcatcaataaaagccaattaacatctttaaatttgttgcaattttatctttgaccgtaccttatgtaagtggaatcatacagtatttgtctttttgtgactggcttatttctttctttttttttttttttgagatggagtcttgctctatcacccaggctggagtgcagtggcgcgatctcggctcactgcaatttctgcttcccaggttcaagtgattctcctgcctcagcctccggagtagctgggattataggcgtgcaccaccatgcccggctaattttttgtattttagtagagacagggtttcaccatgttggccaggccagtctcraactcctaacctcgtgatccacccacctcggcctcccaaagtgctgggattacaggggtgagccaccgtgcccggccatgactggcttatttcacttggcatccatgttgtagcgtgtgtcagaatttccttcctttttaaggctgaaaaactccattgtctgttggatacacgttttgcttctccattcatccattgatggatattttagttgtaaattgactgctgtcaatgtcggatgtgcaaatacctgtttgaggcctactctctcttactggtgccttctctagagagaattctgatgggttcagtttgatcatattttgtttaagatttttggccaggcgcagtggctcacgcttgtaatcccagcactttgggaggccgaggtgggcggatcatgaggtcaggagatcaagaccacagtgaaaccccatctctactaaaaatacaaaaaattagccgggcgtggtggcgggcgcctgtagtcccagctactcagagaggctgaggcaggagaatggcgtgaacccgggaggcagatcttgcagtgagccgagattgcgccactgtactacagcctgggcaacagagtgagactccgtctcaaaaaaaagatttttgtgtccacgctcgtgggcgaacttgacccgttttttcctattttgggttttgaggaaatatttcctctttttatttttcttggaagagttagtataatagtttattttgaatttatggtagaacttgatagtaaattcttctaggcctggagtttgcttggtgggaggatttttgatgatggaattaatttctatagtggttgtgagactgaccactcggggtttctaaatacctttttgagttagttttggttaagtgaggtttttctaggaatgtgtccatttcatctaaatctttaagcttattggcttagagttgttcaaaatattctgtttttttttttttttttttttttttgagacggagtttcactcttatcgcccaggctggagtgcaatgacgtgatctcggctcactgcaacctctgcctcctgggttcaagcaattctcytgcttcagcctcccaagtagctgggattacaggcatgcgcaaccacacctaatttttgtattattagtagagacggggtttccccatgttggccaggctggtctcgaactcctgacctcaggtgatccacctgcctcggcctcccaaagtgctgggattacagacatgagccaccatgcccagccgattctcctttttctaaygtctgcagtgtgtgttggtgcggcccccttttctttcctgattttgataacagataacagccatgttttatcagtcttgcaacaggtttttccattggattagcctttcaaaaaaaccaacttttgctgaattgtgcccccaaggttggaccaatctgacactcctccagcactgccggagagagcctgttttgyggggatggtgcrgggagaagcccacctatcccgaacagaggttggagtgggcactctgctacccaaggccctggggtgtgaattgtggggaaagggaaaggtggatgggcgggtggctcagcygtcctcctgcctcatttctctccagggtgatgctgacagggacactgtctgaccggcagccggctgaactccacctcttccggaactacgatgctccagaaactgtccgggagcctcgtttcaaccagaacgttaacctcaggcctccagctcagccctcaggtttaaaccatgtttgatgcatccatgggaagcgactggcccgagaggctgtggggtggtgggtgggagtcgtgcacttgccatcaggcaccctcaccgtgccaccagcccacccgctgcactggtctttattggctgaggacagggattgcgggggagctgtcaggcccctggcaggttagaaaagtccctggaaagtcctcagctgtacctgccttccaccaggacgaactagccagagagtgtggcttcgtgggtcctgcttctgaagagttcccagcctcccctcttcccgcacccccagcccccaacacgcacaccctgagatctggagtgcatgggttttatgccagtcccttgtgccactgggccgccctccttccccgcccctagaccagctggtgtggcgggcggcccgaagcagcggggcagctcctacttacttccgacccaatgggcgcttcctggacggtgggctgctggccaacaaccccacgytggatgccatgaccgagatccatgagtacaatcaggacctgatccgcaaggtgagtgccgtaggccagagggcctggacccactgctccctggagccaatcctgtgtcagcaaaccatgctagggaccgacccccaggacagcaggtggcttttacacacgcactcattcatatgtgcacacagggcaaattgatctcactggaacctgttccatgggtgggatctgcctgaagcactgtgctaagggggatctgaggaccactgtgctctaagtgtgcatgagtggggagggcggcatgcataccatgaacgtgccactcgagccagcctggggacaggacacatgcttgcccttgagctcacctctgtggatagacagtcccacaggaatgcctgtccccacgggttgccggtgctgtggtggaggaccgtgaggcctctgctaaaaggcctgggggctcggaaagggctccatggaacaggggacccatcctgaggcccttggggacagagcagtgcagaatcagtgatctggaggaagagcagcagccctctctctgcagaggtacagcagaggctggcaggacccagcatgctaggggaggccctgtggcgtggcgggcggtgggtgaccggggtgggcgagcgcggtggctgagctcagaccctggagccagggcgcctctgggggtccccgttctgcctgcactcactgcagctacctaatggggccatcatagcgcctgcctggggaggctgcgaggccttggcatgctgttgtctgtgaaatgttcacagcactgccgggagcctgagctgcatccttgctgctgtggtttcccgaagccccagggcgtcctgggcagcgcagcagaggctctgggcagacagagaagcgccctctaggggccagatcgggcagggcgggcttcctgcaggcggcagagaccgtcagactgtcagacactagccagtctaactctcctattgcgtgcggatggggagcctgggacccagagtgggaggcatcacccaagatcatccagcaaatcggcagcagagcttgttcggaagcaaataagagaggcagcggccgggcgcagcggctcacgcctgtaatcccagcactttgggaggccgaggcaagtggatcatgaggtcaggagatcgagaccatcctggctaacacggtgaaaccctgtctctactaaaaatacaaaaaaattagccaggcgggcatagtggcaggagcctgtagtcccagctactcgggatgctgaggcaggagaatggtgtgaacccaggaggcggagcttgcagtgagycgagatcgcgccactgcactccagactgggagacagagcgagactccgtctcaaaaaaaaaaaaaaaaaggcagcacccagggctcaggttcaagccttagcccctacttccctaccacgtggcccctgcagctgcttcccggcctgagcttcgctgagagccctcatttgcaaactgggtgatcagtgccctctccacagactggctggagattaaatgaagtaatgatgcaaatacctggcaaatcaccaacaccaaggaacaccgtctgcctttcctcccctggccacgacttgacttgggccagcatcagatggggtgggcgggatccttcttgcagctggtgtatgtgtggtcctgttggtacacagatgctgtcctgagcagatggcatgtgatgcccgcaccagccgttctggggtcacgtgcaagaggctggctggaaatcatgccaggcatgctcttgccaccagagacctcttgccctgttctcatgtgccccagagcccagtcttgggcctccccttgacgctccccttcgtgccccctacctgtggaaggtctcttctgactgcccctgtcctgttcccaacagggtcaggccaacaaggtgaagaaactctccatcgttgtctccctggggacagggaggtccccacaagtgcctgtgacctgtgtggatgtcttccgtcccagcaacccctgggagctggccaagactgtttttggggccaaggaactgggcaagatggtggtggactgtgtgagtgtgggcccctcccccaggccacttccctcagggtctgtagcccaggtcnatggcttcccctcatcctgtggggcctttggtgttggaggagacagcagggctctgtccatcgcctttagccagctggagggagagagagtccacagttcagagtctcagtgcggggcagggaccctcagtgaccaccagcaggggggttttcaaacgctttttagctgcggatccctttctgcaaacatagcgcagtgtagaagcccagaatggacaaaggctccagagcgggctgggcgctcaccctgtaatcccagcactttgggaggccaaggcaggcggaccacttgagcacagcagtttgagaccagcctgagcaatataatgagactttgtctctaccaaaaaattaaaaactagctggacatggtggtgtgtgcctgtggtcccagctactcaggaggctgaggtgggaggattgcttaagcccaagaggcagaggctgcagtgagctgtgatcatgccactgcactccagcctgagcaacagaaggagaccttgtctcaaaaagaaagaaagaaagagagagagagagagagaggagggagggagggaaacttcagggagaggggacatggaggcctgtcgactcagccgctaccctttcccccactcatcatccctgaaagggcactgctgagacctctgcccctctgattgcacagctgggacagtccctgcagtcccaggaaggggttttgcccgagccgctctgctgctgtgtggctcagcctgactcgaaagagcctggggctccccaggctggggctccgagagtgcagggcagggccgggcggggtgcgggccgggcggggtgtgggcccggcactcaccaaggctgcttctcaccagtgcacggatccagacgggcgggctgtggaccgggcacgggcctggtgcgagatggtcggcatccagtacttcaggtgagggctcagccgccccagcccttggccccgtgccctggcgtggtcggactcaccgaccttcccctcccagccctagtgtggactttcccttccccaagggtctgctctgttccccaagcccaccctggtcctagctggcgtcccctgcccagcctgagcatcctagggtgaccccctcctccctggcccgaacagattgaacccccagctggggacggacatcatgctggatgaggtcastgacacagtgctggtcaacgccctctgggagaccgaggtctacatctatgagcaccgcgaggagttccagaagctcatccagctgctgctctcaccctgagggtccccagcctctcaccggccccagctgacctcgtccattcagcccctgccaggccaagcccagccactgccctcccgggcagatctgggcccaggcacctctgagtccatagaccaggcctgggagaatgccaagctgcctgcccgaggctggtcctgaaggcctgtctcccactaaccccgccttccagcactttctgtcattccaggctgggaaagtctagagccccctttggcccctttccctgactgtcaaggacaactgactcccccatcagctcaaacattaagggtacccgggcacaaccgtacccctgcccccagccccagcctccctgagggcctgccgggctgcctctgccccagcccccagcaagggcactcccaggcttcctggtgggtgcagcccactccctctgccctctgctccgttccctgggggctgggactaaagaaatgggtgtcccccaccccatcagctgggaaagcccaggccgcaggagtgggatgcccgttggactttgcccctcacactggcccagcccctcacactgccccaccccgagaaccctcagctctcaaaggtcactcctgggagtttcttcttcccaatggaagtggcttaagagccaaaactgaaataaatcatttggattcaagttcacctgtgttgtgtgtgcagtggtgtgagatccacctgttcccctgacccccggctcccctcggccttgacccttggccttgaccggacttttcctttgtacccggacactctgttttccaggatccctgggcagggacacctcctctttcctctaggcctcccctaaaccggcccttagggtatgcagaggcagctgccaggcccacatacccccggcaggcccaaggagggccacaatcttcaacttcatcttggaggaccagggagagccccatttgtcacccagagaggccggggactccgcgtggacaggcagcgcgtgtgcagggccgaggtctgcccagggctgggcaactccagcgtttgtgctgctcctgctccggcaagtggaggagctgggcgggccagagcggctgtgggagccaagctcagagggcgtggccccactgtgagccgcaggcctgaggacagtgagaagtaaagcggcgttcccctccaggggctgctgctgctgggtctggcagagagagtcctgggggagggcatcgggcagcgcccgcccagtaaggtgggcaatgcctggtataggcaggtgggagggcggggccccccagggttggggtccttgaggagggggtgacccaggagggggctcatccacatgggcacttgtatcagcccacagctccaaggggtgaataattgaagggcaggtcacacgagcctgcccggcacaggatgccttccctgccggatctggttacgccccagatcacattctgacatcccgagttggtgaataattaagctgccactcctctgaggcaggcctccatctccaggtccctctccgaggcttcctcgctgccagctgagtcgtgggcacctgagggactacctaccactgctcccggctgtgccatcgccaccagctcccagcctcctgctcagacccgggacagcccctccatggcccccgagatggaccagttytacaggtccaccatggccatctacaaggtgagcacatgggtggccaagccaggcctgagcccctcctcccagggcacagaaatcaggcccgctctggaggacggagggccagccggggctacagatgtcctggaaagggaagcctggagccaggctgggccaggggtgggtacgggggtaaggatccccgagagcactcagccatacagcgggaacccccaactcccagatgctggacaaggcaggagggagcccaaggcccagggtggggagagttgagtctggatgagaagggcctggctgcccggcctgggaataaagaaagaccctccctctctctctctgtctctccctctctctctctctctctctctctctctccctctctctctccctctctctgtctctctctctctctgtctctctctctctctgtctctctctctctctctgtctctctctctctctctctctctctctctctctctctctctctctctctctctctctctctctctctctctctctctctctctctctctctctctctctctctctctctctctctctctctctctctctctctctctctctctctctnnnnnnnnnnnnnnnnnnnnnnnnnnnnnnnnnnnnnnnnnnnnnnnnnnnnnnnnnnnnnnnnnnnnnnnnnnnnnnnnnnnnnnnnnnnnnnnnnnnnnnnnnnnnnnnnnnnnnnnnnnnnnnnnnnnnnnnnnnnnnnnnnnnnnnnnnnnnnnnnnnnnnnnnnnnnnnnnnnnnnnnnnnnnnnnnnnnnnnnnnnnnnnnnnnnnnnnnnnnnnnnnnnnnnnnnnnnnnnnnnnnnnnnnnnnnnnnnnnnnnnnnnnnnnnnnnnnnnnnnnnnnnnnnnnnnnnnnnnnnnnnnnnnnnnnnnnnnnnnnnnnnnnnnnnnnnnnnnnnnnnnnnnnnnnnnnnnnnnnnnnnnnnnnnnnnnnnnnnnnnnnnnnnnnnnnnnnnnnnnnnnnnnnnnnnnnnnnnnnnnnnnnnnnnnnnnnnnnnnnnnnnnnnnnnnnnnnnnnnnnnnnnnnnnnnnnnnnnnnnnnnnnnnnnnnnnnnnnnnnnnnnnnnnnnnnnnnnnnnnnnnnnnnnnnnnnnnnnnnnnnnnnnnnnnnnnnnnnnnnnnnnnnnnnnnnnnnnnnnnnnnnnnnnnnnnnnnnnnnnnnnnnnnnnnnnnnnnnnnnnnnnnnnnnnnnnnnnnnnnnnnnnnnnnnnnnnnnnnnnnnnnnnnnnnnnnnnnnnnnnnnnnnnnnnnnnnnnnnnnnnnnnnnnnnnnnnnnnnnnnnnnnnnnnnnnnnnnnnnnnnnnnnnnnnnnnnnnnnnnnnnnnnnnnnnnnnnnnnnnnnnnnnnnnnnnnnnnnnnnnnnnnnnnnnnnnnnnnnnnnnnnnnnnnnnnnnnnnnnnnnnnnnnnnnnnnnnnnnnnnnnnnnnnnnnnnnnnnnnnnnnnnnnnnnnnnnnnnnnnnnnnnnnnnnnnnnnnnnnnnnnnnnnnnnnnnnnnnnnnnnnnnnnnnnnnnnnnnnnnnnnnnnnnnnnnnnnnnnnnnnnnnnnnnnnnnnnnnnnnnnnnnnnnnnnnnnnnnnnnnnnnnnnnnnnnnnnnnnnnnnnnnnnnnnnnnnnnnnnnnnnnnnnnnnnnnnnnnnnnnnnnnnnnnnnnnnnnnnnnnnnnnnnnnnnnnnnnnnnnnnnnnnnnnnnnnnnnnnnnnnnnnnnnnnnnnnnnnnnnnnnnnnnnnnnnnnnnnnnnnnnnnnnnnnnnnnnnnnnnnnnnnnnnnnnnnnnnnnnnnnnnnnnnnnnnnnnnnnnnnnnnnnnnnnnnnnnnnnnnnnnnnnnnnnnnnnnnnnnnnnnnnnnnnnnnnnnnnnnnnnnnnnnnnnnnnnnnnnnnnnnnnnnnnnnnnnnnnnnnnnnnnnnnnnnnnnnnnnnnnnnnnnnnnnnnnnnnnnnnnnnnnnnnnnnnnnnnnnnnnnnnnnnnnnnnnnnnnnnnnnnnnnnnnnnnnnnnnnnnnnnnnnnnnnnnnnnnnnnnnnnnnnnnnnnnnnnnnnnnnnnnnnnnnnnnnnnnnnnnnnnnnnnnnnnnnnnnnnnnnnnnnnnnnnnnnnnnnnnnnnnnnnnnnnnnnnnnnnnnnnnnnnnnnnnnnnnnnnnnnnnnnnnnnnnnnnnnnnnnnnnnnnnnnnnnnnnnnnnnnnnnnnnnnnnnnnnnnnnnnnnnnnnnnnnnnnnnnnnnnnnnnnnnnnnnnnnnnnnnnnnnnnnnnnnnnnnnnnnnnnnnnnnnnnnnnnnnnnnnnnnnnnnnnnnnnnnnnnnnnnnnnnnnnnnnnnnnnnnnnnnnnnnnnnnnnnnnnnnnnnnnnnnnnnnnnnnnnnnnnnnnnnnnnnnnnnnnnnnnnnnnnnnnnnnnnnnnnnnnnnnnnnnnnnnnnnnnnnnnnnnnnnnnnnnnnnnnnnnnnnnnnnnnnnnnnnnnnnnnnnnnnnnnnnnnnnnnnnnnnnnnnnnnnnnnnnnnnnnnnnnnnnnnnnnnnnnnnnnnnnnnnnnnnnnnnnnnnnnnnnnnnnnnnnnnnnnnnnnnnnnnnnnnnnnnnnnnnnnnnnnnnnnnnnnnnnnnnnnnnnnnnnnnnnnnnnnnnnnnnnnnnnnnnnnnnnnnnnnnnnnnnnnnnnnnnnnnnnnnnnnnnnnnnnnnnnnnnnnnnnnnnnnnnnnnnnnnnnnnnnnnnnnnnnnnnnnnnnnnnnnnnnnnnnnnnnnnnnnnnnnnnnnnnnnnnnnnnnnnnnnnnnnnnnnnnnnnnnnnnnnnnnnnnnnnnnnnnnnnnnnnnnnnnnnnnnnnnnnnnnnnnnnnnnnnnnnnnnnnnnnnnnnnnnnnnnnnnnnnnnnnnnnnnnnnnnnnnnnnnnnnnnnnnnnnnnnnnnnnnnnnnnnnnnnnnnnnnnnnnnnnnnnnnnnnnnnnnnnnnnnnnnnnnnnnnnnnnnnnnnnnnnnnnnnnnnnnnnnnnnnnnnnnnnnnnnnnnnnnnnnnnnnnnnnnnnnnnnnnnnnnnnnnnnnnnnnnnnnnnnnnnnnnnnnnnnnnnnnnnnnnnnnnnnnnnnnnnnnnnnnnnnnnnnnnnnnnnnnnnnnnnnnnnnnnnnnnctctgtctctgtctctgtctctgtgtctctctctgtctctgtctctgtctctccctgtctctgtctctgtctctgtctctctgtctctgtgtctctgtctctccctgtctccctgtctctgtctctctgtctctgtctctgtctctctccgtgtctctgtctctctgtctctgtctctgtctctgtctctgtgtgtctctctgtctctgtctctccctgtctctgtctctctgtctctgtctctctgtctctgtgtctctgtctctccctgtctctgtctctctcatttctgagcccctcagacttcctacttcacccccggggggttgttgcagccgccacagacatttattgagcgcctcctgtgtgcaggaccctttcacctggaggcctcacaccacccacctgtgaggtggaaaatgaccaccctgcttgatagatgagaaaactgagaccaaagaggttaaacagctcattcaaggtcacggagggaggaagaggtgctgctgggatttgaaccgagacccaagtccaagtccaggcccaagtccaggcccgtcttcaccatccagggagctctctgcccggccccagcccgaggaggcccacactaatccagccacagccttgcccatggggggctgttctcggaggagggcgagagctgcccttgccccgggggtgactgttggcagccccaggcgtgtagcccggcaaggcctggacacagggcagggctgagccgtgcccagtggggaccacagcaggcgggccagcttctgcccagcgggaggaggagaaccttccaggtgcaccatctcgggaggcacctcggtcccgccagagcagacgtaagcgggagctggctgtgaggggaccacagcttagaacaggaccccaaaagatgggctctgaggtccctgcagccaagagccaggattctgggtgagcctaggtttgtagatgggccccccaaagtctggggcttctcactgggctgggggtgccctgtccctgacgcctggtgacttgactccatccgtggttccttctcgctcccccatctctacacctttttcctcccctgaccctggggtccagagcatcatggagcagtttaaccccgccctggagaacctggtgtacctgggcaacaactacctgcgtgccttccacggtgagtgcctgcccgggccaccgagccccagccctgggcttctgctgttcccacccacccaggcccctcccagattctctgcatcccacacctgttcatcctcaaccctacaccctcctacccaccaccctcaccctcacacctctgcagccagagaggccttatgcacccccactctcctgtgcccacgcaccccagtccacacccagcacccctcattgccccctccttcaggtgcctccagacactcccatgatgcagtaccaggccctgcaggcccacacagccccagggcagcccctgacagtgcatacatttctaggcgtcacctggatgccaccagctgaacccacccctatactcagtcccacctctgcacccaggctcacacagcagctggcttcctcacttcaactggccaccacccacacaccctgcagctggccttgacattcactcggtccccgtgcaaacccttgtacccgtccgctgtggccgctcatacctgccaatagcaccccactacccaccagtgctgatcaaccctgaacctcagggcctcccatccccctgcttcttagatgctttccacgccacctccctgcccccagccctcaccttatgcccctgcacctgagtttcacagctcaactggtcacaccctcctcagggg

SEQ ID NO: 96109 - DNA, 26969 bp, Homo sapiens
tttttagtagagacaggccatgttggccaggctggtcttggactcctgacctcaagtgatccacccacctcggcctcccaaagtgctaggattataggcatgagctattgcacctggccactttttaaaaataaaagttggccgggcatggtggctcatgcctgtaatcccagcactttgggaggccgagatgggtaatcacttgaggtcaggaattcgagaccaccctggctaacacggtgtaaccctgtctgtactaaaaatacaaaaaattagctgggcgtggtggcgggtgcctatagtccctactgctcgggaggctgaggccggagaatggcatgaacctgggaggtgggacttgcagtgagctgagattgcaccactgcactccagcctgggcgacagagcgagacttcgtctcaaaaaaaaattaatagaataaaaataaaggtaatacctacctgttaaaagaagtcaaaaggccaggtgcagtggctcacgcctgtaatcccaacactttgggaggctgaggtgggcagatcactggaggtcaggagtttgagaccagcctggccaacatggtgaaaccccatgtctaaagaaaaacaaaaaaaattagccaggcattatgacgggtgcctgtaatcctagctacttgggaggctgaggcgggagaatcacttgaacccaggaggtggaggttgcagtaagccaagattgcaccactgcattccagcctgggtgactgagcaagactgtctcaaaaaaacccccaaaaaacaaaaattagctgggcgtggtgatgcaggcctgtaatcctagctactgggaaggctgaggcaggagaatctcttgaacccaggaggtggaggttgcagtgagctgagattgagccactgcactccagcctgggcaacagagtgagactctgtctcaaaaaacaaaacaaaatgaaacaaaacaaaacaagtcaaacagtacaaggagtcttctcttcttccttccagtcccacccctctataatgaatgagtgataatggtaacagtttggtggtctccttcctttttgatgcttatacaaacatgttcaaagatatatgtgcatataagattctttcaaacactggatcgtactgtaatatattaaaataacagactcttttcacttaacattttttcatggacatctgtccagatcaatccatttatatataacttattttttatagctatatactagtatccttagaatggatacattatttattcagctcacctccttgtttcagaaatttaggttatttctaggtttgttttttactacttcaaacaatgctgcaataaacattcttgtacatcaaatctttgtaccgatgctttaatttctatggatgggttcctaaaactttctgtgtggtgcatggacaagcagggacagtttggatgacagcaggtacctatccctcctgctgtccatccccccgcttggccatccctggggcttctcccccaggcgatccaagtgtgtcacctgtctggtcagttgaccccacctctcaactgccataaagcccagcttagagcaggtcccatccattgtttttttttttttttttgagacagagtctccctctgttgcccaggctggagtgcagtggcatgatcttggctctctgcaacctacacctcctgggtacaagcgattcttgtgcctcagtctcctgagtagctgggattatggtgtgtgccaccacgcctggctaattttttttttttttttttttttttgagacagagttttgttcttgtcacccaggctagagtgcaatggtgtgatctcagctcactgcaacctccgcctcctgggttcaagctattctcccgcttcagcttcccaagtagctgggactacaggcccgggtcaccacacctggctaatttttgtatttttagtaggggtggagtttcaccatgttggccagggtggtcttgaactcctgactttgggtgatctgcctgtctcggcctctgaatgtgctgggattacaggcgtgagccaccgcacctggctcatccactgttttgatctgggtgcctgtctaccttttctgcccatccagcctctacaaggtcaattccccaggagcgagcggtcagaagtattaatttttttggtcacacacccaaaaattttgctgtagagagaggtttcactgtgttgcccaggctggccttgaactcctgggctcatgtgattctcctgcctcagcttcctgagtagctgggactacaggtacaccccagtatgtatgtgttttgccaggctggtcttgaactcttgggctcaagcaatcctcctgccttagcctcccaaagtgataggattataggtataagccaccacagctgacctgtttttttttattttttattttttgtttttgagacgatgtcttgctctgtcacccacactggagtgcagtggtatggtctcggctcgctgcaccctctgcctgctgggttcaagtgattttcctgcctcagcctcctgagtagctggtattacaggcatccgccatcatgcccagctaatttttgtattggcatagagacagggttttaccatgttggccaggctggtcttgaactcttgacctcaggtgatctgcccgcctcagcctcccaaagtgctgggattacaggtgtgagctcccacacccggcctgacctgtttttattttaatttaattttattttattttaattattttgagattaggctccactcggtcgcccaggctggagtgcagtggtgcaatcacagctcattgcagccttgacctcccagggtcaagtgatcctcccacctcaacctcctgagtagctgggactacaggttggcaccaccacacctggctaattttaaaaaattttgggggctgggtgcagtggctcacgcctggaatcccagcactttgggaggccgaggcgggcagatcacgaggtcaggagttcgagaccagcctggccaacatggtgaaacccagtctctactaaaaatacaaaaattaagccgggcatggtggcgcacgcctgtaatcctagctagtcaggatgctgaggcaggagaattgcctgaacccaggaggcggaggttgtagtgagccgagatcatgccactgcactccagcctgggcgacagagagagagactcatctcaaaacaaaacaaaacaaaaaagttggccaggcgtggtggctcactcctgtagtcccagcactttgggaggccgaggtgggcggatcatgaggtcaggagatcgagaccatcctggctaacacgatgaaacgccgtctctactaaaaatacaaaaaattagccaggcgtggtggtgggcacctatagtctcagctacttgggaggctgaggcaggagaatggcatgaacccgggaggcagaagttgcagtgagccgagattgcgccactgcactccagcctgggcgacagagtgagactctgtctcaaaaaaaaaaaaggttttgtggagatgaggtcttgtggcttgtggcgttgcccgggctggtcttgaactcctgggcttaagccatcctcccacctcagcctcccagtgttggaattacaggcatgagccacgtgcccggctgtctttgttttttttatatgaggtcctctctcccttaacatggagaagcattaaaagtgtggccccagatccctctgtccaggaagcctctgtggactgccccttacttttcatgatgtccatgatgtggcgctgctggatgttcgtcagtttggattccttcatcatcactgcacgacaaagcattctatgaggcctcttgggctgcaggcggatgccttcacctgacaccctactgaaatttaaaaccctacatcctagccccattctgcactgagcatgccttctctatctttcctgcttcgttttttctatagcacttacgaccacctaaaattctatatattttattttattgttatccttctatattagctgtatgataagaatttttgctggtttaataaaatttctgccctctgttaaatattttttcctctttctctttttttttttttttttttttttttttttttttttttttgagatggagcttccatcttgttgcccaggctggagtgcagtggcgcgacctcagctcactgcaatctccacctcctgggttcaaggaattctcctgcctcagcctcccaagtagctgggattacagacatgcgccaccacgcccggctaattttgtacttttagtagagactgggtttctccatgttggtcaggctggtcgtgaactcctaacctcaggtgatctgcccaccttggcctcccaaagtgctgggattaccggtttgagccacctcattttctttcactgctgtatccccagcacctaaaacagagtctaaggcacatggtagacttaaaaatgttgttgttggaaaaaaacaaaaaagttgttgagtaaaagaacacatgaatacttgttcatcatgtttcaggggctggagctacaattgtgggccgaaacaggcacggttcctgcctgatgaaattcatgatctggagggatagatgggacaccaaataactgactacagcttgtgctaagcccagtgaaggaaaatgtgtgagggcacataacagttgatcctactgtggtggtgaggagcagaagtcttcctcgggaaagttgaaagtgtgatctaaaggatgcataggagttaactactctaaaaattttagttctttgacttttggcaaggtgtagcaccttgaaccttcccctcccccccgccccgccccgcccccgamtaaggcatatgcagtagaattttgaagctttctgaaccccaggctccttatctgtaaaggaaaatagtgctaagccacaggtcaggtacgggggaactgagttacagagggtaactaccaccattcttctctcatcctttaactcaggggtccccaaccctccgtccgtggactggtaccagtccctggcctgttaggaaccgggccgcacagcaggaggtgagcggcaggctagcgagcctcaccgcctcctttcaggtcagtgacggccttagattctcataggagcgcgaaccctattgtgaactgcgcacgcgagggatctaggttgcacgctccttatgagaatctaactaatacctgatgatctgaggtggaacagtttcatcccgaaaccattccccacacctccgtcagtggaaaaattgtcttccacgaaaccggtccctggtgccaaaaaggctgggatcgctgctttaacggactgacctctgagcagctcgcaggtccccggggtgtaagtgatggtcttggggcggcgccggaacccagttcctttggtcactacctccatctgcttctgtgaagccatgggaggactctgaggagggaaagacgcaatgacacaccccctgtctcctgtccctaatctctgttccccgacgcccaacacccccagaagtctggaagcggggatcgagccagagaatgatgccgccagttaatattgcgacagtgcccaaacctcccatccagacacacagatacacacacacagtcctcattctgacccagcgcctgtggcagggaagtctcctcgggagggagtgttaacacagccatggtcacaacagtacccactgagtgatatgccaaaattgaaatttcaccctaagaccctctctgggtgctcccctctccacatagaagtgggctcccggaggcggtgaccactgctttacagccgcatccgcaccggtgccacgcagaaatactgcgcgatctgggctgctggagctggcagctagcgcctctcgctactatagaaacgcgcacacaccagtcagcgcatgcgcactttccccgctctgtcctgcctcccggaagtgatttcctctgggttacggcgcaggcgcaagataagctaggagccgcgcgagtcgtagtgtcgctgtttgcgggtctccgcgcgggaccggggcgcagcggggtcgctgaggcgagggtgtcatgtcagacaacgaggacaagtgagtgcgggagcggagtggcctttgcggcaaccttggaaggggcggatgaggcaaggcttgggtcggctgaggagcctggcgtctaggggcaatgtctgaggggactggggtcctgagggggccggcggagccgaggaagggaagggcgggcgacccaggagcacagccccggctggaggcacaggagggcccaggctcgagggtccagaggggatccgtagaaaaggtgtccttcagcaaatgttccagcgagccgggctctgtatcatgcagtgggaatattgaggtgaatgaacaatcgtccctgcctctccacgtgctcactttctagaaaaggggtcacaggcccataagtaagcaagcaagcaggtaacggtggtcgcgtgagcttccccagttctagacgtatgtagtataggagtactccagaggagggtctggggcagctccaccgggtggcattaaataaaagtctgggacggtcctttgcagtaatttttttttttttttgaaacagagtcttgctctgtcgcccaggctggagtgcagtggcgcgatctcggctcactgcagcctccacctccggggttcaagggattctcctgcctcagcctcccgactagctgggattatgggcgtgcaccaccacgccttgctaattgcttgtagttttagtagagacgggtttcaccatgttggccagactggcctcgaactcctgagcttgtgatccacccgcctcggcctcccaaagtgctgggatcacaggcgtgagccaccgtgcccggcctgcttgtagtaatctagatgagagaagtcagtagcttatagtagggtggtaggagtagaggtggtgagaactggttttgaattctggatatattactattttaaagatagagcccaaaaattacctgtgggatatgtgggtgcaaagagagctagtctgaagataaaaataagaaacgtgtgggattgctaccccattcccagtgagtgtcagtagagaagaggagatgacccgtggctgagcattagggcatttggacattgagtgcttgggggaaaagagaagccggggaggtgggggaacaccaagagggtgaggtgtccttggagtcaagtgaggagagcaagtggcctaatgtgccagctgatagatcaggctaaatgagaaggagagttggccattggatttagcaacgtggagatcattaatgagcttggaaagtggttttgatggagctgttggggtgaaaggctttttggagtgagattatgacaaaatgggaagagaggaagatagtgagggtggacagctctttcacacatttttgcttcaaaggacaccatggaattagggctatagggggagagagaagagaaataagggtttttttttttttttttttagatgaggaaaagcacatgttgaaatgctgatggggccgggtgctgtggcttacacctctaatcccagcactttgggaggccgaggagggtggatcacctgaggccaggagttcgagaccagcctggtcaacatggtgaaaccccatctttactaaaaatacaaaaattagctgggcatggtggcgtgtgcctataatcccagctactcgggaggctgagacaggagaattgcttgaacccaggaggcagaggttgcagtgagccaagatcacgccattgcactccatcctggacaacagagcgagactttgtctcaaaaaaaaaaaaaaatgctgatgggaatgatccagtagagagggaaacagtgatgatgaatgagtactagcaatatttgggggcagatggggaaaaattgaaggggtaaaatggaacaaaagtcggatttacttcttcttcttattattattttttattttttgagaaggagtctcgctgtgtcacccaggctggagtgcagtggggtgaccgtggctcagtgcaccctccgcctctcgggttcaagcaattcttgtgcctcagcctcctgagtagctgggattacaggcgcccaccaccacacccggctaatttttttgtatttttagcagagacgagatttctccatgttggccaggctggtcttggactcctgacctcaagtgatgcacccacctcggcctctcaaagtgctgggattacagacgtgagccactgcacycagctgatttacttattaagtaaatatttattgagtgcttcctacatactgggcgagacacagatctctgccctctttgattttttttttgtttgttttttgttttgcggtggygggggggggttttgagacggagtttcactcttgttgcccaggctggagtgcaatggcgtgatctcagctcaccacaacctccgcctcctgggttcaagtgattctcctgcctcagcctcccaagtagttgggattacaggcatgtgccaccaccactcccggctaattttgtatttttagtagagacggggtttcatcatgttggtcaggctggccttgaactccacccgccttggcctcccaaagtgctgggattacaggcttaatcccagagccacaatacaaagccaccatgcccggcctctgaattttttttttttttaatttttcttatttattttgagacaggttcttgttctgtcacccatgctggagtacagyggtgcaatcttggctcactgcaacctccacctcctgggttcaagcaattcttgtgactcagccccccaagtagctggtattacagacatgtgccaccatgcccggctaatttttgtatttttagtagagatggggttttgccttgttggccaggctggtcttgaattcctggcctcaagtgatccgcccacttcaatctccgaaagtaccaggattacaagtgtgatccaccgtgcctggcccctctttgattcttttaagtgatgctctaagtaactgatctcttcttcctgtacagttttgatggcgacgactttgatgatgtggaggaggatgaagggctagatgacttggagaatgccgaagaggtcagtattcagcctcaggctcccacctctgcagcccaagctgccaaatcgtctgacaggtgatgattagctgaatgtgtctgccttctatttgtggtcaaggcccctgccataagcattcccagttagagtgagctgtgttccagtcttgcatagcagaacagccctgcagggtgggcctgaaagcttttgtccatgtggtccacagcctgtggcttctggggcagttagttcactgacaagttaaacggtgccttccttcatttggcaaacatgtgttgaatgtttattatatgccaggtgctttctgctgggtgggactgcttaaggagcaaagggaagaggtaagcagggctcagatgaggcagtattttgtagcctaaaggcaatgggaagctactgacaaactttgagccagggcacagtccaggttacattttagaaagtacattcctgcctcgagtaaggagtgaactggggaagggcaagagtgaaaggtgagaggcctgtggcttggacataggtgctggtagtgcaggtgatgagaaggcagataaaagagttatttcggtgggttggttatggggctgagaaagtgagtggtgacgaggacgactctcaggtttctggcttgagcaactaggtggataggttgccagcctcaagaggaaagtagggctttctgtcttgtgtgactgatgagggaaaaaatgcagttatgttctggagagacatggagccttctctctctctgcatggcactttcagataccttttcacttgagtcagatgcgtccttctccatccttctggtccccttcccatccctgtcatgtagattgtgcctcctagatgtacttcagccctgtctgcatttttctactcctggtgccttaacctggcttagatcttattgcttttcagccacattcctgcaggaattgtgtggctggttttcctgcttcagtctcactccagactctgctctgtgtgctcttctcctttcagcaccctttcttacttgcccacatgctcagttactactggctttcctaaatggcctctctgcttctgccactgccscctgcagaatattcgcaacagagtatccagagtgatcctttctttctgttttttgttgttgttgttgttgtttgtttgcttgttttaaattaagaagtggtgtcttgctacgttgtctaggctagagtacaatggctattttcaggtgtggtcatagcgcactacagccttgaactcctgggctcaagtgatccttccagttcagcctcctgagtagctgggactgcaggttctgcaccaccatgcccagctcagagtcaactttttttttttttttttttgagacggggtcttgctctgtcgcccaggctggagcgcagtggggcgatgttgactcactgcaagctctgcttcccgggttcatgccattctcctgcctcagccttctgagtagctgtgactacaggcgcccaccaccacgcccggctaattttttttttttttgtagttttagtagtgacggggttcaccgtgttagccaggatggtctcgatctcctgccttgtgatccgcccgcctcggcctcccaaagtgctgggattacaggtgtgagccactgcgcctggcctgtttacttaattctttatataccacagaatttattctcttgcctacaatcctctacgcaccttttgttctaattattgtccacaactagttgtccaaacctctttctcctctatgcctttgcatgttgcctccttcctcattggtttgacagctcctgctcatccttctaggtgagctcaagyctcatccctggagttttcctaacccccagtgtgagtgaggtgtccccacctcctcgggaactctgttgcacccttcatagcacctgctctgtttactcttgtctcccctttagaccattaattgagagcagaaattcctagctttctttctcagcatctgttaacaatatctggctcaggacaaatgcttagtaagtaattgttaaatattcctgccttcaccttgacttttctagccacttggcccattggctcagctcccctatctgaaagatgggaagactattcctagcttcctgcttagggtaatttttttgtgccaggacctcttttacaggaccaacattctgataccaccccatctccaggccctctgctctcttctggatgaggcagttagctctggaatctcagacctccattaccaggtctgaggcttggtcaggttagctgactttccaagcctctgaaatgagaactgtaatccctgcctcataaggttattgtaaggattacatgagttgttaggaagcagttatgtggtcccctggcatgcagtaagcattaacggtggctgtagcgagaattgtgattgttgtcattatcactctccctgtaacccaaaagtgccacctgagtctttccctcttttttgtctyggtgtccaggaaggccaggagaatgtcgagatcctcccctctggggagcgaccgcaggccaaccagaagcgaatcaccacaccatacatgaccaagtacgagcgagcccgcgtgctgggcacccgagcgctccagattgygtgagtgattgccccttcactgtcttctccatctgtcaggccacagtaagctcttgtacygctgatctttcccagcctggcacctgaaaacagactctctgctctcacattccaaaagtggtgccgtccctgcgtaccaggcattgagctagtcccctgccctcagggagcttgtgatctaataggagaactaggacatgaacatctgagaagtcaagtaacaatatgggagaaaaacgataaaaaaaaaaaacagaactagatggttgcgtgtcagattagtgcagcaaaaaaggtgaattcagagccaatgtgtaccagtgtagttttttttttttttttttgagatagagtctcgctgagtcacctaggctggagtgcaatggcacaatctcagctcactgcaacctctgcctcccaggttcaagtgattctcgtgcctcagcctcccaggtagctggaattacaggcatgtgccaccatgcctaactaattgtgtttttaatagagacggggtctcgccatgttgcctaggctrgtctcgaacgcctagcttcaagtgatccacctgcctctgcctcccaaagtgttgggattgcaggtgagagccaccgcgcccggccatggtggttctttgttgttttattttccgagtcaagatctcaatctgttgcccatgctggagcacaggggcctgatcatggcccattgcagcctcaaactcctgggctcaagcaattttcttttctttttttttttttttgacagagtcttgctctgtctcccatgctggagtgcactggcccaatctcagctcagtacaacccctgcctcccgggttcaagcgattgtcctgcctcagcctcccgcgtagctgggactacaggcgtccaccaccacacctggctaatttttgtattttttcttttttctttgagatggagtctsgctctatcacccagcctggagtgcagtggcgcgttctccgctcactgcaagtgctgcctcctggcttcacgcccttctcctgcctcagcctccagagtagctgggactacaggcgcccgccaccgtgcccagctagctttttgtatttttagtggagacggggtttcaccatgttagccagggtggttggtctctttctcctgacctcatgatccgcccgcctcggcctcccaaagtgttgggattacagacgtgagccaccgtgcccggctatttttgtatttttagtagagacggggtttcaccatattggccaggctggtctcaaactcctgaccttgtgatccacccgccttggcctcccaaaatgttgggattacaggcgtgagccaccgtgcccggccggtgcaattttcttttttctttttttttttttttgagatggagtctcgctctgtcgcccaagctggagtgccgtggcgtgatctcggttcactgcaatatccacctcctaggatcacgccattctcctgcctcagcctcccaagcagctgggactacaggtgcccaccacaacgcctggctaatttttttgtatttttagtggagatggggtttcacggtgttagtcaggatggtctccatctcctgaccttgtgatccacctgccttggcctcccaaagtactgggaktacaggcatgagccaccgcgcctggccggctcaagcaattttcttgtctcaacctcccaagtagcttcaagctgggattacaggtatgtgccactatgcctggctttgtattttttgtggagataggggtcttgctatgttgcccaggctggtcttgaactcagcctcaagtgattctcctgcctcagctcccaaagtgctggagctgggattacaagcatgagcaaccattcctggctttaaggtggttcttgatgtgaggtagactatggccagtccagcagagtggggggccctccagcttgaaagcacgctagagagatgaaagcacagagcagtggtggggttttggggatttgaaaatcagcaaacttccctcctctcccacatttgggagaataaagattcaggagatagagtagacaggtggagatgcgagtgtccaatgagtgcagatgtgttagccataggcagtgcaggccttcagatgcctgctaaggtttggggcagactggagaacagactggaagcaccctctgccaacagatggctttgagaaagcagggactttcaaagaggctgggccacagatgcctgctttttttccccccaggctcacctgtcagaatagttcctcctcctttcttttgaggagtaggtgaggggacagagcggggtactctaatggtactgtggggaagcatgagggaagcatgagactgagaacaggagcccctaccccaaactccctatagactgatgtgggaaatggtgggtatctggaggagcgggggtagttcaagtagggaataatggaaattagcctagaaagaaaagcagctgggtgccgtggctcacaactgtaatcccagcactttgggaggacgaggcaggtggattgcttgagcccagaagttcaaaatcagcctgggcaacatggtgaaaccccatctctacaaaaaatacaaaaattagctgagtgtggtggcgtgcgcctgtagtcccagctactcgggaggctgacgtgggaggatcacctaaggccaggaggttgaggctgcagtgaactgtgatcgcactactgcacaccagcctgagtgacagagactccatctcaaaacaaacaaacaaacaaacaaaaaaaaaacaaaggaaagctggggccagatttgtggactctgtgtgcttacaggggcagcaaatgctgtctgtacattctcctccttagtgttcaagcagcactgggctgttgcctcctctagtcctgtaggggtaaagatgaccatcatgtctacttcaataaagggttttatgggtggacaacattgttctcccccattcctcagtagcggacctcttctcagcctggttgcactccttgctcttatgcatggcattagagccacacccagtgtgacagccatacccaatatgccaccaacgtcaggatcctctgggcctgcaccatcaactatggtagccatgaactgtatgtgtccatttacattaagtacaattaaataaaattagaaattcagtttctttctcactagccagccacacttctttttcttttatttatttatttaattttttttgagacggagtcttgctctgtcacccaggctggagtgcagtggcacagtcttggctcactgcaagctctgcctcacgggttcacgccattctcctgcctcagccttcccagtagctgggaccacaggcacctgccaccaagcccggctaattttttgtagttttagtagagatggtgtttcaccgtgttagcgaggatggtctcgatctcctgaccttgtgatctgcctgcctcggcctcccaaagtgctgggattacaggcgtgagccactgcgcccagcctatttatttttttttgagaaggagtctcactctgtcacccaggctggagtgcagtggtgtgatcttggctcactgcatcctccgcctcccgggttcaagtgattctccaacctgagcttcccgggtagctgggattacaggcacccgccaccacgcctggctaatttttgtatttttagtagggacggggtttcaccatgttcgttggccaggctggtcttgaactcctgatctcaggtgatcctcctgcctcagactcccaaagtactgggattacaggcatgagccaccacgcccagccttttcttttatttttttagagacagtttggctctatcacccgggctggagtgcagtggtgctatcatagctcactgcagcctcaaaacttctaggcttaagtgatcttcccacttcagcctcccaggtagctaggactacaggctaatgccaccacacgtggctaatgtcttaattttttgtagagacagggtctcacaaaaagactcctggcttccagtgatccccctgcttcagcctccaaagtgctgggattacaactagccacatttcaagtgtgttcagtagccacatgtggctactggttaccataaaggatagcacagggggataggacatttctgtcattgcagagcattctatggggcacmctaatataggctaaaagtggcccagtagaaagaagaattcataagttatttttaaaacaaatagactgcttatttgcaagttaaacagtctttcagcactgaagaaagatactgcattagcacttgataggatgctgagatgattaaagatgtagtcccagccgggcgcggtggctcacgcctggaatccgagcactgtgggaggccaaggtgggcggatcacctgaggtcaggagttcgagagcagcctggccaacatggtgaaaccccgtctctactaaaaatacaaaaattarccgggtgtggtggcgcgcgcctataatcccagctactcgggaggctgaggcaagagaatcgcttgaacctgggaggcggaggttgcastgagccaagatcgtgccactaatccagcctgggtgacagagtgagactctgttaccaaaaataattwaaaaaaaaaaaaaagacataatccccagtcctccaggtgttttctggtgggggagatagacctgtgcacaggtacccacaacccaaggcagatgcgagtggtgctttatgaaaggtacaaagagagttattgcagaggtgactgggaaagccttgtgaagggattagaattctagtggggacaggtaaagagagttggttttgtgggtactccaggtgccagaaacagcccaaggaaaggtccaggtggaggcaggcagttgtggatttgtgatgagggatcataagcagcttggggcataaggctggagaagatgacactggtcctgtgagtgacaggttcagaagattagagttcatttggtgggcagtgtgcagcacttaaaggttttgaggccaacatccagcatccaggccactcataaatccaagtgtcctgtttttcttttctttctttctttctttttttttttttttttgagatggagttttgctcttgttgcccaggctggagtgcaatggcatgatcttggctgattgcaacctctgcctcctgggttcaaggaattctccagcctcagcctcctgagtagctgggattacaggcacacgccaccatgcctggctaatattttgtatttttagtagagacggtgtttcaccatgttggtcgggctggtcttgaactcgtgacctcaggtgattcacctgccttggcctcccgaagtgctgggattacaggcgtgagccactgtgcccagccaagtgtcctgtttttcttggggagcaaagcttgatccagctcattccagtctttagtgctctttccacttaagggctatgacaccatctggtggctccttgcctgctgtaagctcttgtacagccataatgggactctgcacttggtaggtgcaggtggagtctcactctgtcacctaggctggagtgcagtggtgccatctcggctcactgcaaccttcacctcctggttcaagcgattctcgtgcctcagcctctcgagtatctgggactacaggcatgtgccaccacggccggctaattttttgtatttttagtagagacggggtttcaccatgttggccaggctggtctcaaactcctgacctcaggtgattcacctgtctcagcctcccaaagtgctgtgattasaggcgtgagccactgcacctggccagaacaactgtttgttgggtaggttttggatggggtttcagtctggttcattagcaccacctggtggctgatgatgtttgtcacatctrcttcttaactggatggttgatgtgtttctctgtagaagccrtggtgcaagaaaaattaaattacttaaggacacattcttgcacattccatgtgcatrataggtgcggaatgagtgaatgcccttgaattatttatattttgaaagaaagcaggcayatgcagatcrggtattttgccacattctttaaagctttatattttgggaaagtttaaatacttattaagagaggatatagggaaagttaaatacttcatctctgcccttgggaaattttcaggcttttgggagtaatataaatcraaatatttagtaataaaattagtaagctggtagctctcagactagctgattatcagaatcatctgggcagttttgcaaatgcaggctctcaggccgcttcactagagattctattccgggggtctggggaaggacccaggaacctgtattttttagcatgctctcctgttaattctggatttgttggtgtgaacctgagctggaatcatcaggggtggcttcctagaggagatgggcctagaattggcatccctttgcttggtggtagagtccccactgtgggccaagtgttatgctgggggctgggcctccgtggtgaatcacatgtggttctgggccactaggagctcatggtctaatgtggaaagtttccaaacaagtagttacagttcaatgagattggtgccaagaaaagtatatgcaaaatgagtccaggtactgaagagtcagcacacgatttccagggtggagacatctgaacctctcgcaggtttttagggagaggaagagcttgtaagagcacacaaaagggaaacaacatggcgcatctagggaaccagaaatagtttggtatggctggaatgtggagtaaatacaggaaagtagcacgggactgtgctaggaaggcaaacagggaccagactgcactctggcctgatagccaaggggagtcatgacagtgttgtaagcaggtgagccccctgactgctggcctcaggtgaagggtggggagggctgggcaggaagggcagggcctctactgaggtgttgtgtctatagagaatggaaatgatgccgggcatggtggctcatgcctttcatcccagcaatctggaaggctgaggcaggcggattgcttgagcccaggagttcgagaccagcctgggcaacatggcgaaatgttaatttcacccatctatacaaaaaataaaaaaattagcatagctggtggtgtatgcctgtagtcccaagcaggagaattgcttgagcctgggaggtggaggttgcagtgagccacgatctccccattgcactccagtctgggcaatgggagtgaaaccttgtctccaaaaagtagagagagaaaatagaaattgaaatgaggtgcactgggcactgaggcaaggctctggggttggagcagttagaatggtgtgcctttgcacatgtctccctttccaccaggacattctgctgtggccgctggactccggagtctgtgataggcctctgccagggaagatctctggcagtgcccctacacaccactccctactgtgcctgcctacctagaagatgacgtttctaggtggggaccaggatgccgttccaccctcactgcctgttgggcccttctccctgggtttgtagtctccctaacacctgtccctrtccctacaggatgtgtgcccctgtgatggtggagctggagggggagacagatcctctgctcattgccatgaaggaactcaagtaagtcactcaaatcatggttcacttctccaaatckctgggaggcatctgttgggctctctgttgcaccctttgctcccacttgcctggctggagaagttgatgcttattcctacagatccttaggaacagctcaccaggaagtaggaggaagagagaagaggaggcagggaaagtgggagggcactgatgagacatggacgtcttctggctgttggaatttccctgttcctgctgcaggaggccttaccaatattctgtcattcttccccctcttgtctgatataaaaactttctttttcttgtaattgctttcttacaaagtacactcatcagccccaagaggctgctcctaagacttctctttgcttgtgttttgcacacaatctgttccttctgcggcagagctggggtcaccagccctcatgtacttgtgacttctcccctgccacagggcccgaaagatccccatcatcattcgccgttacctgccagatgggagctatgaagactggggggtggacgagctcatcatcaccgactgagctggagtcatcttcctgcccttgccccatgcccaattttcattctcactttatatgtgtaaataataaaatattcaactttccaacccccttcccctctgcttatctgcaatgtcaccacctgttgcttccccgttaccgccatgctgcgtggagcatgcacctattccagtggccctgtgactgtcagctccttaagaagcaccaggggcccttagcccctttggatcccccacatccttccctccatctccctgttccccagagcaaaggctgctgcaggggagacacctcagctgccttccaagcagacagacaagtctttgtgcccagggagctggttgccacggaaacccccaatttcctttccagtggggactggctgcaggggcttctcccttctcaggagtatcacagagcaggtctcatcaagccacccattgtttcctaaggacctgcttcgagcctcttatcgtgggctcrgatcccctttcaggagcagtgccccagcaggaagcgtgggggtgtgctgatctcccaccctccccaggcagagccctgctgggcaagtcagcagctggagcaaggaccgagcacctgcctacccctgcccccatggctctgtccccactcctcctcaggactctgcccacacgctgtcctctgtggcccacctctttggtgtgccacacccatgccttcttcctagcctctataagatatcctttccctcctatttggggctggtgatcccctgaggccttggggacatggtgctggggtggtggtgctcctgggttccaggtgttacattaagtcagagctggagytcccccttcctctgcctgaggttctaatgggtcctcttcctttctccaccctgcttacccaacctgaggtaagaccagtcacactggctcctccctcctagagggggtcagggggagggtgtatattgacatgaacrgggatagagggtaaactggctccctgaatatgccagccttaacctccattccactgccagctccccttcaaagaggaggagctgggcttccctaacctctgcaggaggcagggcctccaggcctaggtgcagcctggccctgggatgggatgtggggagtgaatggtgaggatctgcattggtgggaggggtgtccgctgccctggagaagggttaattcagggagcagtggacttcacacycccatccaccctcctccaagcctgtggaatcctttaatcaagttgggtgctgaaatttcagctctgaaatgccgcctttgtgctggcatccaggcagccgccccagagtgcgggggtcactttctcggccccatttctctaaatggtctctttgttccctgctgggctgctcagtatcagatgtgattaaagggagatggggtttgggctggggaggaggggaattgggggttaacccttaggggatagagtgcaagggaaatgggacagaaggggtgtttttcctcctgtcttcctcttcccattctcctcttttggggagtcccctgctattcagctgtctgggcctggcttttgacttctcttgaataaaatgtcccggtcaccactattggttctgttttcttagggtttgggcatagtctcttgagtcatttccagaaacacctgacccttttttaacaagtggagctcctgccttcctgaggcctgtgcacacttggaacctttggtctaagggatgcacacaacccaggtcttctgacttccttggggtcatttcccctccttccacatcctcagtgatttcccactcactctcatgagatgtggggtcttggaggtgatagtgtcatcttccggatgtgccccctgctccccactgtgccagctccatatccctcatcccacggcgagcaggagtagtgaacagaccacaaatggacaaaagtcctgcctttcaatgaaggggaaagggtgggttgtaaagattataaacacataaggttagtactgattgatccatgacaaaattctagaataggtccctccatgtttaaaagtgcttatataataaagaggagatcgggcactagcatagggtgtctaagaaccaatattgccaaataagtttttttttcgatggttactggtccagtaggttgagagaatgccagagatcagtgaatcttgattttgacaaggcatcagtagtctccatgccactgtgacagagaagtgtgtgcttcatggtgatgtaattagacagttttagaactgattagacagcctcaagagtggagataatagctgggcgtggtggctcacacctgtaatcccagcactttgggaggctgaggttggcagatcacgaggtcaggagatcaagaccatcctggctaacacagtgaaaccccgtctgtactaaaaaatacaaaaaattagccaggtgtggtggcgggcgcctgtaatcccagctactcgggaggctgaggcgggagaatggcgtgaacccgggaggcggagcttgcagtgagccgagatcccgctactgcactccagcctgggcgacagagagagactccgtctcaaaaaaaaaaaaagagtggagataataggccaggtgcggtggcttacgcctgtaatcccagcactttaggaggccgaggcaagcggatcatgaggtcaggagattgagaccatcctagacaacatggtgaaaccctgtctctacttaaaaaaaaaaaaaaaaaattagctgggcgtggtggtgcacacctgtagtcccagctactcgggaggctgaggcaggggaagcacttgaacccaggagacagaagttgcagggagccaagattgcaacattgcactccagcctggcaacagagcaagactccatctaaaaaaaaaaaaaaaaaaaaaaaaagagtggagataataggactgacagtggagagaggcgtttaatgctgtacacaggtgtccctcttcatttcgacctttattagtgacttgaatgaggctattcaagtttgcagatacataaagctctaaaggagagctaagttctaaaaagtttaatacaggtggggaaatgggtcaaacccaacaaggtgagatctgttaaagatcagtgtaaagtcctgcttttatctaaaacaaaacaaaaacagcatacatacaatttggatatgactttgcaatggatattgtctaaaagatcggggtttcggttaccatccagcttcacgggaaccagcagttttggggaggttgcttgaagagcttccatgatgcaggtcctagatggagggattttggccaccctggggactgggctacttcttggtgccctgcctctcccctggtcctgactaggggctggagaccgcagatggaaggaagggagctgaggatgcccagtctggagcagtggaagatgcattgctccagatacaaagcagaagcaggggctgcaaaccacaggcaggtggaggggatgatggttaaaaatgcaagccttggagtcagagctgggttcagattctggcaccagcacttcttagcatcagcctcgcaaacttcagtttccccatctggaaaattgagataacgatcggacctaccccttcactggcctgaatgacataaaacccttggtggagcacttagtaaatggcagctggatataagctgttatgagctgggtatgaggaagaacttccaaccatcggagttgttcatcagtggagcaagatggcaaagagtctttggagttgtgtgcttgtgaggtggagtggtcctggcctctgggtgcagtttggacttctgctgaggaaagagctcttagggagtaggcgcttaaggagtagactgtctgacatccttggtctggacttggacatgggcacctgctgtgaaggcttggctagatcctggcgtgggctgctgtgtgtgtgctgggggaggtggcaagtggggggatgcagcaacacagggcctatccacacatcctgaaggacaggcctctgactgcaggcagcacggtgtcaccctcagcccacctcctcctcttcagatacctgtctcttgaattctttgcaaactcccgtctgctgagtgctgggtgagcagaggggctgcttgcaaggcagtgagttctagctgagccagttaagagtgagtggcccccctgcagtgtggggcatagccgccgggctggggagaagttcccatctgaggcttcagtccctgagctcagatggaccccactgggatgccagctgtcctaacactctccattgttcccactttcttagcagggagagagacagaaagagagagaggagagtgggaggggggagagagagagaaaggagagggggaggggggagagagagagagaaagagaggagagaagggaggggggagagagagaggaggggggaggggaagggggtggggaaagagggagggaggtgggagagagagacctttgatgatctatcctttgcattctactcctagctacttccagaaagcatttgaggaagcaccagtacagggataagagatgaagagacaggccaggtcaggctcaccaagcaggtaaccggaacctttaattttattatgtggaatgcttaatgcagagttaataggggctagagtggctaggagaggggactactgagataaataacaggagacagtaatgagttacatgtggatttggggggctgcagaacaggaaaataggggcagatatagctacatactttattcaaataccactgggaggcaaggggtaagaggcaagggcagaatgtacaggtcaggattctagtgtcttcagcctgccgacagcaacctgggtgctgggccctgtgtctcctggagccaagggttagggcctgagcagctgtcactctctgggaagcccagggagtggggctgactgagcaggggccatagagcctagtaagggaagagggagctggcaaggagcccagggagggaggctctgtgaattgtctctgattcctttcctggagcccctgcctcgtcacctcctgggatgcgtctcaaggtcatggaggttgtagtggaggaggactgggggctgtttctcagacaaagaatgaggttattggcacagaattggatcagggggcctctgtgccaactccttcctgccttcagaaagggagggggcattgaagggatgagaactccactaagtccctcgaaccccccactccccaatgaggctcctcaaagctactctcagcccctgagtgggagacacggccagctcygggcacagtctctgggtggcctagcccttaggcactgtggcataggtggcatgggcatgtcagaccctcactatctgtgagagagaaaacaggagtcataggagtggtaaggcctccgatgccaccaaccctggtgcttcccctccccgaggagggtgagcaggcccttctcaggtcctgggatagagggtcattcctgggggaaggtgcagcccctcatctttcagtgtgggtgcaacagtcaacctccttctcctctgtccagcctgttctcctggggctttgctgctggagcctggatggggcgggtgggtcatcagggcagtgagccagacagaaagccccccgacctgtcagcctcttcagcctcctcagcctcctccactgccaccaccaggcctgaggtgggcaaggaacagggcacacaggctgggggcaggggctgggcggggggtggtggcgacagggccccctttagggccgggacagtgtcgtatatactggctgctcccagtgtgtggggctgtgggactggggccctgaggggctggggtcagagatggccgtgtagaggggccgctgcgagggccccatataggagaaggccgagtagaggccagaggcctggcccgagtggccataatagggtcctgagggctgatggtcagagtagtcaaactgggggcgggagatggaggggaaggctgagccatagtggggcaggctgagggaggtgtaggcgatctrtgaggtggatggctrgtcggtgtagtgtgggggcccctggggccccgcggtctctgtcttcacctgggctttggcatccacaccaggtggtgagaccgtgggcagagccacgcctggtggcttggagatccaggcggagtgtccactggccacggccagggcactgcccagcccatagccggctgctgaktagctgctcacrtggcctgggtgcccattgggcggcaggtactggtccaactcagccacatcaaaggtctccatgttggacattacctcgtggctgatctcaccaatgtccacgttgccgaagtcgatgtgaggcttcccgccctcccccatggagcgcccgtcccgcttcgggtctgccttgccckactrcagctctgtcttcggggtggttggaggggtgggtgggccatggctctrgcctgggtagaagggagacagagagagagagcgcaagggggaagcaggttagaggcaggtgggcgcacgtgaacttccatggttcaccttcaggcagcgggtgcctctgggaaaaccttgtaagtttcacattttggcagcatgagtcgggtttttttttgttttttttttttgagatggagtttcgctcttgttgcccagactggagtgcagtggcgccatctcggctcactgcaacctctgcctcctgggttcaaatgattctcctgcctcagcctcctgagtagctggaattacaagcgcccaccacaatgcccagctaatttgtgtatttttagtagagacggggtttcaccatgttggccagggttgtcttgaactcctgacctcaggtgatccacctgcctcggcctcccaaagtgctgggattaccatcatgagccact

SEQ ID NO: 96110 - DNA, 68888 bp, Homo sapiens
tcaagcgatccttcagcctcagccttccaaatagctgagaccacaggtgtatgccatcgcagccagattttttaaattttttgtagagatagggtatcactatgttgcccaggctggtttcctaatacctggcctcaaaccatcctcctgcctcagcctcccaaagtgctgagattacaggtatgaaccactgcacctgacctacaaaacactttgatgacagtaaatatatatgaacaaatagctggccacaaattttgtataaaacaacagtatgttctgagctccacgagaaacataattgcaatcttatgatgcattcagagaggcagcataatcagaacaaagaaagcagttttattatcttgtgtgctgtttagcacactccttatttctggacacaacactctaatagagagactaagaaactgaagttctttctcatgagagtcagagtccaacatgatgggaaagaatgacaaaatcttataggaaatatggcaggatccatttcagctctttggaggactggtatgtggaagaagaagagttgtgtgcagcaccaaaagagggcattctgaatggtttcagatgagcagagccagcagaggcaaggctggggcaggggaaagggagggtgtatacagaaatggagtataaatatgattcatggcataagcaccccaccagaatgggcatctcagcctggacacttcctttacttagcacaatattggccgaaactacatgctaactaatggtagtggttatgacagaggaattcactggctaagagaaaaggagaagacagatagaagatgaagagagagaagagatagaggaagagaaaagagaaagcagagggagagaaaggatcttgtgtgctgagctaaggagtttgcattttatccttactgcattgctgcctctcttcctactatacatgagaatgtgtccctagcacagcatccctcccaccttcatcctcacaacacaatcacctggcatttctaagctgttggtaaaagaaaagtaataatcagtgataattacatctttcctgcgtcatcaaaacttttaaaattatctgattctcgtggaaatgatagttctagttgtaaaatagatggaggagaggagagagaaagaagttcaagtgctaagagatgaaaatgggccatgaggagacagtgcctttctggaagttgagtctggcagttaagtgaaggatgaaatccaaaagagcctctcaaaatgaaggaggaccagggtggagtccagggaacatgttgaaggcccaagcaaggtgttggctacaggaatggagaagaggagctgggtgggaaggatttttagaagacagaatttctaatatttgaagagtgacttgataaactagcaggattgaggagtctaagctgacttatagatatcgggcttgggcaactgagtggtgatatctattacaaggaagcccaggagaatgcacaggtttgaaaggaagtggaaggggaggggagagttgatttcatttgggctggagctcagctgaaagcattatagaaaaaaatctcaatataaggaagagttttcaagaaacaaaagtgttcaaacaatagaatgagttgcagtgggaatataaccctctgcttatccctatgggtgaagaggaatctggtgactttctgtgatcattcccactccaaagcagctgtctcccaggacaagggcaaagatgctttctccacacaaattggcctgttcagaactcactgtccatctgaaatttgtagagacttgctctagccattgccttagggcaggtgaaatctaagaaggaaacagaagaggaattacccaaaggtgtgggagcaggagtcttcatctgtggctagatatagaagagtctcgtgagctttttttttttttttgcagtgagtacaccaaggtctatattctagttatcttgttttatggataacttgttttatggataacaacactctctatggatggtttctaaatttacgtttgttccttagtaaacttcttttgggaaatttcaacccacctcaaatgaactaagtgataatcatatataatcatggccacttattgatgtctgactccaaaatctaagctcttaacctctaggctgggtcctccataggttttagaatgactgaataaatgaatgaaggaattaatgagctcatagagaggattaggtagtgttatctacatttaggagaaattaagtaatttctgtgtgtgaaacagcctactcctctgctaccctatactatgccttagtgtgaattaggaaaggcacactctctgggtgattgcagccctataggcacaaggtttggcaaatggagtgtccactggaagtcaggccacacttgccatcttggccgagtgcctttgtacaggtcacagcctgtatacaacatttaagttgtaaaaacagaattttatctcacaccctctgactttatatacttttctcttccactagggatcatactgcttttacaggaaagcacatgactccatctcccaccaaataacagcaaaaaaattagcagtttatccaaggtatttgtgaaagcaaagcagtaatcacatcttctccatgctgttactattttggaaataatcagttacgagatgagctacggtataaatttatgaataatttaaatagtaaagatgatgattgagaaggaagccaaaagactaacagatgaaaatgtgagatgctgaagtcacaaaaagatcagaaaatagagatgccgtggataggaagagacagcagtgcttaacacctgtatacttagagtgccacactttgattatcctaatactttgttatagaaatgctatatctgttcattcattcaccctttcccttatttgtcaggtgtctattgatcacatgctatactttaggcacagtgattgacattaggtatacattaaccaataatagtacatggtcccagtctttaaaaaactcacaaaccactaaaaaaaagggtgattacacagattcattataatataagtatagtatagtatagtatagtatagcatagcatagcatagcatagcatagcatagcatagcatagcatagcatagcatagcatagtataaatttgaaaagctctaggaacaaagtgtcgtgtgaacccaggagcaatcatgaatcattttcctgagtgattgggggaagcagtatttaacctgggccttgaagggtgagaggagcttttaaagagagaaaatgaaggaggtagtcaaggccaagagagcagtaagtgtaaagcctcagaaatacagaaggccacggaatgcatactgaatggggaggctccagtagagaagatgaggcatgaagggtatagagaaggtgagtctagggaggcaggttggagacagaagcaaatgttttacatgactcaaccctatggtggggacacgccattaccatctgccaagcagatacatactgatttagcatcatccccaatctgtcatcactcctttcttgggaggactttaagaacacaatctatatgtgttaaggctggaatggacctttagggctttaaggctttagaattgcataaccttgaattcaaaccctggctctgctattgagtgtggcatttggggcaagatacatctcccctctgaaacttagtgtcttgatctgtacaatgaaagtgacagaacctcacagaactaaaatggtgactatgagttggcccatagaatgccttgtacacaggacacacttcataaacactgacactaccccttctactcttcattttatcccctctccgtctttcagcagaaacacatttggcccaagaatgttggtaacaggacttgcattattgcagtcttttcacgaagagaatttcacaacttagtatctagattctgtttgaagattctttcaaatagaatattctacctaaactccttccttgtgctgccccaatgatgcaggaaagagttccacagagcaggccagtgtctactgttctgaaaatctctgcggcatccccgtatgtgttgttacagttttaacctacgaaccttcctggggatttgaagaaacaatgaacccagaagaatattattgtcagtacactgttccaggactctagatagctgctcagagtacagcgaaattgcaattgattacattctatactttgatcttgatccatcaggatgtcttccaacctaatctgctctgaaacaacaagcagcacatgatttttcagtacgggtcacaatgagatattttaatcaccctcttcatcactgaatcactcttcctggttaggggacctaaactttagtatcataaatgtgaaaaatttaaacacctttgaaattatttagtccagcatttcccaagggactcagggggcatgtacagaagcagaatggacactggtggcattttctgtacaaaagaagcaatggcacttcactgcctggactgattctaacagataaaggcccattttacgtcattgcatctggagacccataggtgaaatgagtctaaagagttgatattgtatccttctaattaaccttgttcattataaaaataccttcttacttctataagtaagcattattataatactacaataataagtaggctcatatgtaattcttggatatatctaaagttgatttactatttgaagatgtagcactcattatattcattaatataattcagagctcrctccacgttaggcattgaggtaaagggaggaaatctctgaatattgaagagaaggtaggtagtgggttcttatcagtggaggtatacacatatgaaatatatctgatgtgtttaaaacatagtaaatgccacttggcattattattaatttacttaaccctcataataacttcatgaattgagcgggtattatcatcacccccatttaggaaaaataatatagaagcgtcacaggcaattcaagagacttgcctacaattacttagctagtaagtagcaatgctagaatttgcatgtaggaaagctggctccagcgtccactttcgtaatcagtataacgcaacaccaccactgcagagtaatttgtatggcttccatatatacagtttacaactttggtaatatttcttcatttttaattactcccttccccaaaccataatagcaacaagtctagcatctccctcttggaaaatctttcttctttccagaaacaatttaaatccctggaagagaagactctctttcttccaaacataaacaggatataggaaccatcactgcttctcatagccatacggaattgctacttaacatgcacctgaggtggaaaaatatagtttgtcacctctattctgtttctggctgtcaccaagtctctgcacaggccaccacagcatttttttaatagagagtgaggagcctccttcagtgacaagcttagccaaaggtgtactattttagaccacccagggctctagggctgtgctcttataatctctcatgcctttgccttaaggaatcatcaactttaacctgtccttctctagaattaactaattcaaggggccttattcccctgggctttggccaagaaaccagagagagccctcaatggaagatataatttgcatagccaaacttggttgccgcactgtctcagatagtgtgagcaactttcacattaagactgatgctggacttttataaagatttatcccaacccataaactcaattatttcttctggtgataaataaaatagtgatctcatcaatgctccaggatcccctgactgtgttggtcatacctagagaagcagtacacgtagtaggtgggtctccagcaggaaactttcacagagatggttttcagggataattttgatcaatcaactggaaacattaacttggagttacaagaaaatcctctgcaatgaggtctgtgctgattcccagactgagcacaggacaagataagaaaaggaacggayctgtggataagcatgtctcttcaaagcctctgacaggtatctctgatttayaggatgtcttcagggccatgcatccagagcttgacattgtgcagttgtacctgaagccactgctcattggagaacttgccccaggagagcccagccaggaaagacacaaaaatgtragtgagatgtcaggatccaggggtgtagaaggatggagacgaggcatattttaaagccaattaactgttttctgtgaagggtgggaccacagtagagtcaatggatggagtccacrtatttcaaaacaatgcctttttctttagatcatgggaactcttaaatcttagtgaagaaaaagaataaaattcttatcccttcatcaaacagtaatttcatgtctctaagcacctacctcatgccagggaacttacggatataatttccttttcaytgactgcttttaattatgttttatatctatgtctatgttcccagcccaaatatgttgcatgagaggcgagactatgtccacttttcttatccctgtgtcctgaagacctcctttcacaggatcaacatgtagtaggaactccaaaaacagctactgattgaaagatgtcaccgtatcctaactacagcctttttacatttggggaaattatcattcagggaaaacaaattactctctaaaagtctgacagctggtgtatcaaagagctgagactccaaatcacttctctctggctccaatcccttaggtattcccaaggaaaaatgccattctttctttaatattttggctacatgaatactgtcttctaaaggacagagtctccataggactaaaaattcactgggatggttttacataacgccgagaggaattttacttaatattgagtaatttcatttttcaaaatttattttttgtaacagcttacatttgcctgactcttgaaataatttttataacgtgtggatccatagacccctgtgaagcagagggagcaaggattttattctctcttaaaaaaatgaagaaacagactcacaaagggagcaggactaatctgaggacacagaactggttayrggcaaatctgagactaataggtaagctccatctttaggcccatgttcatcccacagcacagctctgttccaaagagtgggatggtaggatggacagcctgcactctcaccccaaccttgccattctcaaattgtgtgagtctaggccagttcccaaacctcttttggctcagtttctcccccataagatactgaaaacaatggtaccaaccttatgagagttattgggaaaacaattgaaagaagtaaagtcatcatttaaagtgcttagaacaatgcctggaacacagtaaatgctcaatacattttacttattatcataatcacgaactgatgatggtactagtaattttaaaactttcagatatgtccccatcatttgggtcaggtagctctaggttaaaaagtgaaggtgatgcaaaattttattgtttttcctaaatttttcctgtaagaaaaataaaatcccactaacgactgagacctatcagataatcattatctaaaagagtgttggtctctggagataaaggtctaccataaattttctttaatacatttatatggatattcaagttgctgtatatagaaaattagtatttgagcataaaattggatgtcaggtgtgggtttgagttcaccacctgtcactgacttgttgacaacttcaagccagtcactcttctgggttttgctgacctccctcaactctgcaataaatgttttgcaaaagatgaccaggctggaggcaccctagagatagcaaattaatattagataattattaaaataacctgtggccacaagaattctaagattgatggggtttgggagatgagcctatccagaacttttgscaggcaatgggtcctttaaaagttgtatctgtgaattttgaaatttttggcttctggaattattttcatagctctttcttttttttgtttctaacatttctcctttcttacatctgtacaaccctgttatagttctcataacctggtcactttcccagctgtcctagtttcaaacccataatagtcaataagccaagagatatttctttccaaccttgtgasctccccagtatgatgtggcaagcttgtaaaccaatgctaatgctgaacatgaacactcacacatgcacatacacacagggcccttaaacgagacctttccaactgagtacacacacgctaataagccctgccttgttttgggggatccactaagcagctctcagaaaattcatcctgagagctaatctaagtgaactatattgttctacratctccatcttccatgaaataaccctttctacacattaagcaactgatggcctggaaagcactttgtaaactataccagtaactggtaacacagatccatatagatgaccaagttcccccaaacaaaaccagagctcactcaacacctgaaataattctggtggtttacaaggcaacagttaggcacatgtatctctccactgccctctcctctccttccccmtcccctgaaaaaaatctaattctgaattccataacagctttaggacagtttacaagtcaytattcatctttcacttctgcagaaaacaacaaaaaaatttcrtaaactttttaaaggttttatttgctggttcattgttttggggttttaattctggacaattaaatgtattaataaaattctattaataaaagagatgtatacaaaattaataaaataaattattaattatgttcatctgtattccctttcccctgaaagagctaatttactctttgaatatttatttcatagtcccagttggtaaaagatttccaagaattgtggagcatcgcagaggctatgaacatgttccatgccaacctggggttcttctttcttcactttgtgcagatcttaattttggaagtgctggcrtggctaatagtgtatcattttggcagtggctggcctgttactatgttcatttcctttcttctcacaatttctcaggcaagcaggtatactaagcccaggcagcgtcctcatagaaaggctcagaatttcttcttctctctttagattggtgtcagctgctgcctgacacttcttggcaaggtactcatcaatgtcaggcacttaccagcaagtgaccaagcttcattgggctttggttctctcctctctaaagtgaggataataatgaatgtggaattattctgagaaggactaatcaggcaaatgtgtaaaatataaagcacagtgtctggcctatggyaaatgtttaattagtgacaattgctgctgtttgccctgttttatgcccaccatctcagtgattgaagttctgtccttagccatgccacacacatatttatctttcattctttaatcaatcaacatttatcaatgcatcagaccatgaattcttcaagggcagatgtgatatcctatgtgagaatcagaacgtgtgagttcctccataaatgacaaatagcaactgacacttagcagggcatttgataaatctttgttgaatgaagtatgaatctctgaacatagccttctatgagcrtgataccatgttgtcgatacaaaggaaaagtcaacatgctccctgctcctgagaaagaagtcgtgtagtggaggaaatagtccttcacaaacagcttaacacactgcctggcacaaatcaatgatattaatcccaagaagaggaacaagcattactgtcggagcagaaaggagcatttaattctcattagaatcattggaaaaggttttgtagagaattaactgcaatgtgtttcgaggttccagaattctggatgctgattctttttcttaaatcctcttgtttaatttcttgaaaagtgacttttggaagcaagaaaggaaacaaatatttgtttagtgcttagcatacgctgggcactttacatataggtatgtagtacaataaccccgtgagttaggtattagtgtccccttctatcagatgaagaactgaaggtgagagctatcgagtaacttgcccagagtygtgaagctcgttagtggtgaagaacagtttagaattcaaatctgtctgacaccaaagaccatggtctttgcactccatactggaaacctttgaaagtgacaaggagagcattccaggctgatacaacaaaggcataaatgttggaaagaacaggcaggatatgtatgggaaatagaaactaattttggctggaggtcgaacaagatcacccacttttcccaaataaggttgtgaatctactatgggacttgttgattgatttcttgttagggtcccaatttctctaacagtaacttcctctctcctaggctcagagctcatttttgcagcatgacgcggggcacctttccatatttaggaagtccaagtggaaccacgtggtgcataaatttgtgatgtgccatctcaaggtatgggacgtcagggagcatgagggggattcctgaacatgagtccctaaggagtggttcccatatttgtacattgatatcagtaaaaaatatttatgataccccacaaataaatataagtgtactaacaaggtagataatatgtactaatatataatacaacactataaaatatgtgctgaaatgagaattttaaattaaattttttgtgaggatttatttagttctatttaagaagctcttatattttgtattaccctggtagactctttggctaaatccctggcacccccctgccctaagggaccacctcacagaagaaagtgtgtgccttgaaaaatgaagatgtgcattgtgaaatcataagtgggaatattcttagaagggattttgggcaaggaggaggcagctatgaagaaataaaggaaaagatgcaaaacagatactagtgaacagaaagactagtcaggaaaagccagatggctctgttcaagartgcaggattgcaaaatccagactgctggaaaaagcaggtagtgatatgacagctggtcttatcccctcttacttgggctccaggaagcaggtacactgtcctatgcaccactgcagtgcagcacctaggagagtgcttggtgcatggcggcgggggggagccttcaataagcttttgttgaaggaaggaatraaagaaagaaagaaagaaagagtgaatgaatgaaccagttaacagtgcaggacttccaagcatggcttccaggcctggctctgacagtgctcattgtgagatctttagtaaatcacattctatccctggtcctcagtgttcccatcagtagtactaggagttaaactagatmtctacttttctagaactttctagggtttggtgactatgtactctggcctagaagggaagcaaatgtctctgagccttccactaaaccaaatccttgcattcaaaccgggatcccttaggaaaaacctatgggcactgactcagagcctattagttcttccctaacacagtgattttatacatatatctcattctggttatctgcttccccagcccgtagtggcttggaagtagccaactaataaaagcatgaagacaatgctggagccaggcccacagagagtagtgagcagtaactacttacagcaaacaataaggaaacacagatggggactcacattgtgtgagcctgacaagtgccaggttcggaatttgccccgttaggctattttctcaagtaattctaatgatgtgaggatatascactcctagttttcagttgaaattcatgttcagaggggttaagcatttaagccaatggacataaactggtcagtggagaattcatagcatagcactaaataatgcaggcactagagcagagctgctcaatgctggctatcatttgaagccacctaaagaagttattttttaaagtccyaatgcctaagtaccatctctagatattctaaattcatccccagtagagtctagacatcagtatttttggaaagttccccaggtgattctaacctacaaaaatgaacctgccttctgtgagaattcaggcactcatgagctgagtcactttgaacaaattacttaatgattttgaaccayagtttcttcaactgtaaaatgatgatagatgatggcttcaacctgataaggatgttgttaggattatacgcaatactcatgtgtcatgctcaacaaagtgtctggcatacaggaaatgcttaataattgttaattgttattaatactagraacagtctttccataatcaaaatgaagactcagaatcaataagaaaaatatttaatygttgaagtattaagaagatggaaataaatcacatcatcactaagttgcaaggtacctggaatcatctacttttatctaccctctctcccattgagcagtttgagccttaagtcaatcagataacacagagttggatttygattcatattggagatgtgtcccccaaaatagttagaatgaataataagttgttatttcatgtgataggtcacatttgaccagaaaattcctgtgggcattctattccaccctctcttcaccagtgtaagatagattagtctgtttctggattcactcagagatacttagcacagaataaaagcagaggcagtttcttctgctattgtgagtttcaggtaatagaccatcccatttttcctcctctgttctgaggagtcagaggaaaggtaagactcatctgccctggaggtagctggcagttgattcagtgccagtatgtgaaatatttcagatcagccccacccatgctggcactttaaaaaaaaaatcactgctttcccattgatcctgatttgtacacagctatttctatgtaagttgtgtctccagaaacaattttgcactagtcgaaatgaatataaccttgatgacttgtgaactgagtaagaacatgggcaatggctctaaaagcaaatcaagtgtactctgcctttttttgcagacaaaaacagtgactcatgagcaaaatgaacattggcttcaactatgtgcaggagagaaaactacctgtggaaagggaaggtgggcggggaggatgtgacaaagaaaattacaatataaacagcaacatccccgccttagacatgcatcacaattttaaagtttaaaatttaacttcatgtcaattacctccccccacmaccgcctggaaaagacaccaatatggagattctttagaattttcattcaccaactgtgcaaaaatgtatatgttctggtctttccagtgtttgtacaataaaagagcacttcccaaaataaaccatgaaatgtttgcatacattttggactactgtgcaatactaaaaacaaagtggactccttgtagcatatttttcatattcatcagtrtgtgcatataaaaaaactaagagtcaagtctcattatagggatagtgggacagaacatttgaaattaagatcttcctagaaaatctggcctatactgattccatgatgacatcctaaaacattttattttggtaaggaaaaggaaagtgtcaagcatgttattttctgcaatcctctaagaagcctcatccattttacagatgaggaaattgctcaaggtcacatacctaaatagatggccaagcagggattaaattcaggttggtttcattccaaagcctgggttcattcttttttttttttaataccctaagttctagggtacatgtgcacaatgtgcatgtttgaaacatagatatacatgtgccatgatggtttgctgcaaccatcaactcatcatttacattaggtatttctcctaatgctattcctcccccagccccgcaccccccaacaggccccaatgtgtgatgttccccgccctttctctaccgcactgagaatagacctaatgtggaaatgaggaatgacagggttgttcctgcctagaatttggcgaaggggcagcctatttggcatgccgctgataatcctctcttgcctgtggagtactttctttcccttgtctctggatatagtggcttccagaaagaagggccaagggaagacatttatttggatcacacccataattactctgaccattattctaagctttacctgttaagatctgcttcccgtcatatcatggatccaaaccggactcccacattactactcaccacagataatcattggctaaaagagtacagtcagctggcggaagaatccaaacattggttctcaggtgacttaattgaaaaggagawtctctccttatcatattgtccttgttcagttgtctactgctcccattagattatatgtttcctaagtgtggaaaccccattttatcatgtttatctttatgttccaaatgcctagctcagtaagtatctgacacctaggacataattcaaaataaataatgaatgtgtgaataaatacacaattgtaagattaagtaggtcatatgcaatttaaaaaatcttttatcattttattttatttttatttataatcgacacatagtaattgtatgtatttatgagctacactatgatgtttcaatacatatgtacgttgtgtaatgatcaagtcaaggttattaggatcttcatcactttaaacatttatcgtttctttgttgtaacattcaatatcctctcttctagctatcttgaaatatataatacctgattgttagctacagtcaccctactgcagtggtcctcaatctttctggcaccagggactggtttcatggaagacaattttcccatggaccagtgggtggggtgtggtttcaggagattcaagcacattacatttattgtgcactttatttctattattattacactgtaataatgaaataattatacaatttacaataatgtagaatcagtgggagctctgagcttgttttcctgcaactactgggtcccatctggggtgatgggagacagtgacagatcatcaggcattagattctcataaggagcatgtaacctagatccctcacatgtgcagtttacaataggatttgtgctcctatgagaatctaatgctgcagctgatctcacaggaggcagagctcaggctgtaatgagaatgatggggagtagctgtaaacatagatgaagcttcccttgctcgcctgccactcaccttctgctatgcagcccagttcctaacagaccacagactggcactgattcgtggcccgggggctggggacccttgccctatgtgtaatagaacaccaaactcatttttccggtctagctgtaactttgtacccatcatatgcaatttgatggaagaaacacagagcactgatggggcccttgaaggggggacagaaattgttaagtatagtttgtgacatgtagaggcttgagtatcatgaaatatccaaatayacacacacacacacacacacacacacacatacacatatatatatcacatatatatcacatatatatcatatatatcacatatatatcatatatatatgatatttcatgatactcaagctcaatgtgtcacaaactacacttaacaatttctgtccccccattctgggtggggggtagagagagagagagagatctaaatatatatatatttggaaagtccccattcaggcataagattcaggatagagagtcaggctggaggattgcaaggttagggagtgttaactggggatgcgatggsggttgctaagaaacaactgcaaagaagactatggaaagacaatgctaatgcttacaggttttcaaataaagagccatccccttctactatagatgtatgatatccagaccagcattctccaacagaaatataatgcaccatattaaaatgacatatgcattttaaatttttcaatagtcatayttaaaaggtaagtttattactccatatatattcaaaacagtattatttcaacatgtaatcaatgtaaaagttattgatgaaatattttacattccttttttcatactgaatcttcaaaatccagtaggtattttatacttacagcttgtctttattcggtcgcttttcaagtgctcaatagccacatgtgytaatggctattgcattggacagagcagactagaacatgtatagactgctygctaagctatgtgaaatatgcaataaaaactactactgctgctcattcttctgtaaatgattaacataaaggaggaaaaactgaatatgccaacattttacatacgtcatctcataactccccagaccacccacggaggtaaatgtccttatgttatttaccggagatagaactgagcctcaaagaggttgggtgatttgccgaaacgatgcagcagtatttatacatccagcataggtaactaggttgatatgcctccaaattctttgctctattaaaatttcagactttctatgattaaaaaagaaaaaaaaacacaaaaacctaatcagaggtgactcaagattggcatgtgctawaatctttttattctcatttatttttgtatgacagcattgaagccgggacatgcaaggatctgagccaagacccccagggagatcacttcagatccatgattctttgaaacactcattgaagtaagatacctggggcygcatctttttccccagaactaattaaagtctcggagctaagtcttctttatatgtaaaatagaaaaaatactctctgccccagctaccttcagatttattttaatgaagatcagataagacaaggatgggaaaacatttcttttcaaccagcttttacgattttccttaccaagacttttagcctaaagttgtgtttctggatcagagaattatttctttgtaagctatgagcgcctctgtccgatgagtcatgctgtggctcagcagtggaggcaagctagagaaactcaaatatcttattttgastttggggatgcatgcagaaaactctgacagtgaagggtatttcaggaaagaattatttcaaataacgagcccgctcttctcctcagggcctrtcagcagaccggtggaattactggcactttgaacaacacgtaaagccgaacatctaccccaaagacccagatattgacacggacccastttttctccttggagattcacaacctgtcaaggtacacttagaaatcttgagcaccgaggaaatgttcctggaagtggttcgtggaaaggcttacagccttgccttggaaagatcaagctggaaattctggcttcacacacaatctgagaacatctctccttcttttaggttcaaaatacagatttgaaataactgaatctggggctgtaagaatacaaggcgatttagagccgtaaccattaagtctatgaccttacagatcatccagtccaacctcccacggcaggaaatatggaaatccacattactctgagcaatcccagtgacagrtgggtccctgcccagtgcctgtcatttcctctgaggcaatacaagccaatgttagatcgtggaaccagatgactgaagttgcaatgactgtctgaggtttaaacagggcatggagaaacattcactgagagaatataggtcaatatattcaataagcactaggtcacatacgttcacatagctagttatctcaactaattctagcccagttagaaaagactatgctgttatatttagttcatgttcattttggtgcatttacacatgaactacagcccaaatgccatggaagagatctacaggtctcacctctaatttgagcttcttaaacaacagaaaaaaggagggggaaaaccatcttcagaatttctcagttaattattactttttaaaactccaacttatttctgagggctctgttctgttccattgatctatatctctgttttggtaccagtaccatgctgttttggttactgtagccttgtagtatagtttgaagtcaggtagtgtgatgcctccagctttgttcttttggcttagaattgacttggcgatgcgggctcttttttggttccatatgaactttaaagtagttttttccaattctgtgaagaaagtcattggtagcttgatggggatggcattgaatctgtaaattaccttgggcagtatggccattttcacgatattgattcttcctacccatgagcatggaatgttcttccatttgtttgtatcctcttatttctttgagcagtggtttgtagttctccttgaagaggtccttcacatcccttgtaagttggattcctaggtattttattatctttgaagcaattgtgaatgggagttcactcatgatttggctctctgtttgtctgttgttggtgtataagaatgcttgtgatttttgcacattgattttgtatcctgagactttgctgaagttgcttatcagcttaaggagattttgggctgagacaatggggttttctagatatacaatcatgtcgtctgcaaacagggacaatttgacttcctcttttcctaattgaataccctttatttccttctcctgcctaattgccctgtgcagaacttccaacactatgttgaataggagtggtgacagagggcatccctgtcttgtgccagttttcaaagggaatgcttccagtttttgcccattcagtatgatattggctgtgggtttgtcatagatagctcttatcattttgaaatacgtcccatcaatacctaatttattgagagtttttagcatgaagggttgttgaattttgtcaaaggctttttctgcatctattgagataatcatgagccctcagaaataacaccgcatacctacaactatctgatctttgacaaacctgagaaaaacaagcaatggggaaaggattccctatttaataaatggtgcagggaaaactggctagccatatgtagaaagctgaaactggatcccttccttacaccttatacaaaaatcaattcaagatggattaaagatttaaacgttagacctaaaaccataaaaaccctagaagaaaacctaggcattaccattcaggacataggcatgggcaaggacttcatgtctaaaacaccaaaagcaatggcaacaaaagacaaaattgacaaatgggatctaattaaaataaagagcttctgcacagcaaaagaaactaccatcagagtgaacaggcaacctacaaaatgggagaaaattttcgcaacctactcatctgacaaagggctaatatccagaatctrcaatgaactcaaacaaatttacaagaaaaaaacaaacaaccccatcaaaaagtgggcgaaggacatgaacagacacttctcaaaagaagacatttatgcagccaaaaaacacatgaaraaatgctcatcatcactggccatcagagaaatgcaaatcaaaaccactatgagataccatctcacaccagttagaatggcaatcattaaaaagtcgggaaacaacaggtgctggagaggatgtggagaaataggaacacttttacactgttggtgggactgtaaactagttcaaccattgtggaagtcggtgtggcgattcctcagggatctagaactagaaataccatttgacccagccatcccattactgggtatatacccaaaggaatataaatcatgctgctataaagacacatgcacacgtacgtttattgcagcactattcacaacagcaaagacttggaaccaacccaaatgtccaacaatgatagactggattaagaaaatgtgrcacatatacaccatggaatactatgcagccataaaaaatgatgagttcacgtcctttktaggcacatggatgaaattggaaatcatcattctcagtaaactatcgcaagaacaaaaaaccaaacaccacatattctcactcacaggtgggaattgaacaatgagatcacatggacacaggaaggggaatatcacactcyggggactgtggtggggtggggggagggatagcattgggagatatacctaatgctagatgacgagttagtgggtgcagcgcaccagcacrgcacatgtatacatatgtaactaacctgcacaatgtgcacatgtaccctaaaacttaaagtataaaaaaaaaaataaaaaaaaaaactccaacttaaaaccatcatgtaaaggacaatgtcaattaccgagatttttaggagggagtatttcttaagcataggagatataaggataaccaaagaaaagtgcctcccctcaaatgaagtacctgagagtcaggtacttgggaagagtttgctatctcctagaaaaactaggagttttataaaaataaaacgatatagccttctcagttgttgcctgtctggtacattaaccaaaaattgtgcaactttttgaaagtagtttttttcatctttgggagactcacccttttccctagctgaaatagaaaacaaggtctcttgctttgaaaaaattcttggtgctgtgatcacaaatcagttgcttttgacaatgattccacaaacacattggacttccctgatgtttgtgggtttctatgatcatcattagaattctgaagtattgatttctccaattgtcccctcatatctccccttccccctagagagcaagggagtttgtctcagggaagttcatgaagcagcttgagttcagacatgccttctatagagctattttcagcacacatgctacctcttcacaaacaatagaggctacctctccaagttctgaagctgctcctgggacatccctaaaaccttagagttctatataacataatttcaaagccactgcagaagacattacttacaattatttatttaaactctaaaattcagtagtttcacatcaaaaacatttctaatcagccctgggcttttcctttcttccttctttactgtctgcctttctaatactttattcaaatgttaagtttcttcagcaagcatttatattcttctatgtcctgtgcttatatcctggaagaccgaatcctcctttaaggtgatactcaaaatctgtccattactgtttgtccactcccacgcatttccaactagtcyctttaccatgtttcctgttcctaaaatatttaaaggtttaggaataactgcaaatagctattattactttatcactatgatttttttgtaatttttgacaataagagaaggaaggaccaactatacaatccaaatacaagaagaaatctatacataggaggaaagatatcaaaggaaaggagaaagcaagagtcaaacactgcccagagttgtaactgaagggcaaaaatacagagtgagtatgaattatcattcattcgttaattccttcaataaacatttattgagtgtctgccagatactagagatataatcattacttctatcctcctttcaaagcatttgctttgtgccctgaatatatgccagattaactaaggagactcctagaaaatgaatcacattttcagtagtgaatgtaatattataattatattattatactgtaattatataatgtataatagatattatatgtgctgtcatcatgtgctaaaataataaatgatagtgtgatttccatgatgagaacacaaagaagaaagatgagacagacaggagaggccacaactatatcttctatcatattaccatttagtatctttcggatgaatgaatttaaaagaaaattcttgactgtgatgaatgaatcatacatctgttggatgaatgaatgaatatggagcagaatcctaaatgccatagttgaagaagcacaagaaaaactctgaaatgtcccatttcagtgaccattccacctcacataaaaagaaaaaaattcaaaatgattcccataagaacaaaaaaatgatcacaattcctacagtcaaatggaatattccatttgtgccagaattacccacatataattgaagcaaaaagttgccacaatatttcctcccatcctggttctggttcttctagttcctcagacttgaaagccgatgaacagtgatcagatggctcttcccataaagattttagacatacacacatgcatgtgcacacacacacatacacacacacacatacacatgcatcctcgagtgtgatgaccagaagtatggtctcttattttagttttattatctctctattcagtacggcaagaagaaaatcaaatacatcaactatgaaragcagcacctgtacttctacaaaggtgagtctcccagagccacattccttgtatcccatttacttgaagcaartacttgtcaagggagaaggccgattggaatgctctcacagagaccagcccatgtcctattgctactgagcaaagcagaatgtcttatttatactcactggggtggaaatcggcaaagggaaatggaaaagtaaacagcctttttaaagggcacctcatcattctaagagttggatggggaaggaaggagatacccaacgagggagggaaggcaggctgccagtcaaggggcctgcatctaggactgtcattctggaaagaccaaacatctatcaagagaaaagaataatggtgtttgtgtaggaaggaagtagacatggggaaataaatctgaagcatttgcagtgtgacaccggaaatggagaggccgggaaataaagggcatctgcagtgctcttgtgtggaagaaagctgtctgctcccatgacctgcatacagctgtgggaaggcatgagacatatatatctgagtgtgggcatgtgggtcaagtgtgaaggaaaataaaggtagctgagtaaatctgataccagtaaaagaacatcataagcaaagagcctttgctcttaaccaatatcaaactcatagcagctcacaaaaaaaagaaacccccaaatctgcccaactaaaacatacatctgggggttaaaccaaaatcagggaaggaaccaaacatttcctgtaatccagttgttctcaacccgagcaattttgcctcccagaggcagtctaaagacatttttttggttatcgcaacagaggaagagggaacgtattggcagtcagtggatagaagccagggatgctgctaaacattccgcgatgcaaaggacagccccttataaaaataatcatctcacccaaattgccagcagtgctggggttgagaaacaccgttgcagatgatctgatttgcccacgtgtaggccacacacctatcatgccagaggaggacagcagggggcaaattttttgaagtgtgagattgaccatcactgctggctcctccacagttggaattcagcctccccgatcctgcactctcacctgccccgcttctcttgcataacctgaaagaggaatgaggacattggtgccccatttttatttatttttatttatttattttttaattattattattatacttgaagttttagggtatatgtgcacaacgtgcaggtttgttacatatgtatacatgtgccatgtgctgcacccattaactcgtcatttagcattaggtatctctcctaatgttatccctcccccctamccccaccccacaacagtccccggtgtgtgatgttcctcttcctgcgtccatgtgttctcattggcgccccatttttaaaaggtagccgattcccagcctaagtagatgtgtgtttgcataagaaaatgctgttggactttcttctgtgaactttcctgagaaacatgtgtttacctcccctgtctgtagtggggcaatatgcccttcccttatgagaaatgagggaatggtgtgaattcactgcaaaatgcccacctcacaaaccacactgccaccaccaagagctgttttattgtggcctttcccggcaaatgctagcttaacatctcgggtgcaaatgagtcatactcaaactgtcaaaaagaaacaaaaccagacatttgttaaaggcagcaagacaaattatattcaggcaattgcactaggggagagagacttcaccataaactgagcttaattctcctgacgcaaaagtgagagagaggcttttaaatgctggaacatactaaaggaaaagtactgaaagacactgggagatggggtagggggtggaggagttggttgataagatttgtccaggctgtctgtgtctgctaactggtacttatcaaagtttggctcctatcctcccaaatagactgacagataacagccccagccttcttgatggctagatttcaaagggattgttaccaggcccctgagaaatacatttctggagtatagaagctacatctcaaaggaagacacaaaggatttacaattgtcagtgtcctaaagtaaatgctctaagaaaaaggggtgtcaggtgcctatagtcagatactggccagaataaacagtaaattattttggcagcattgagctttctcaggtaaaaacatcaaggatgctgggattaccccagagagatggccttgagctttgagaaactatgctagtgtttgttcaagtttcttagtttggagagtggatgaaatcatttgtgctgagagtctgcaattctcgtaggccaaggttgaggcytagtcaagaagagggctcagaggatcctaactaaagttcgaccagggagacagcctttgtcaaaagccaggggatgtccttaaggatcctctgtgcctgggaagcctcaatgatgctgggagagaggcaggtaaataactctgaccaggaaatgagtataccttctttatcactgacacctcaacacactgtaatggggctaaatcccaaagatccagggagactgaaggactccaagtaccttgaaaaaacttgaaagctgatagcagaagctcttcagggatgctttcatcaaaaatgactcaaatctcccaagctttcctcgcttctttgaggcagcttgaacctggagctactaaccaaattcctagcccagccttttagacttgaaatgcccagtgcagtccaggatgaggctgtggatctccaccttgcatctttccttggggccagcattccaggaaygctgcattaaggagatagactcctgctgacttgcattggggtcacattttttaattaaatatatttactggatktattaaataaatgtattaagtacattataaaaatacaacacagtaattacaaaacagatgctggatcatcctaatgccaaaaactggcagagacacaacaaaaaaagaaaattttaggacaatatccctgatgaacatcagtgcgaaaatccgtagtaaaatactggcaaaccaaatccagcagcacatccaaaagcttatccaccaagatcaagtcgggactcaaggctggttcaacatatgcaaataaataaatgtaatccaccacataaacagaaccaatgacaaaaaccacgattgtctcaatagatgcagaaaaggcctttgataaaattcaacacccctttatgctaaaaactctcaataatctaggtattgatggaaagtatctcaaaataataagagctatttatgacaaacccacagccaatatcaatttgaatgggcaaaagctggaagtattcccgttgaaaattggcacaagacaacctctctcaccactcctattcaacatagtattgaaagtttctggccagggcaatcaagcgaaagaaggaattcaaattggaagagaggaagtcaaagtgtctctgtttgaacatsacatgattatatatttagaaaaccccatcatctcagcccaaaatctccttaagctgatcagcaacttcagcagagtctcaggatacaaaatcaacgtacaaaaaccacaagcattcctatacaccaataacagacaaacagaaagccaaatcatgagtgaacttccattcacaattgctacaaagataataaaatacctaggaatacaacttacaaggaacrtgaaggatcatttcaaggagaactacaaagcactgctcaaggaaataaaagaggacacaaacaagtgtaaaaatataccatgctcatgaataggaagaatcaatatcatgaaaatggccatactgcccaaagtaatttacagattcaacagtatcatcatcaagctaccattgactttcttcacagaattagaaaaaactactgtaaatttaaaaaaagcccatatagccaagacaatcctcagcaaaaagaacaaaactgaaggcatcacactacctgacttcaaactatactacaagtataccaaactatactatggtaaccaaaacagcatggtactggtatgaaaacagagatatagaccaatgggacagaaccgaggcctcagaaataatgccacacatctacaaccttctgatatttgacaaacctgacaaaaacaagcaatggggaaatgattccctatttaataaatggtgttgggaaaactggctagccatatgcagaaaactgaaactggaccccttccttacaccttatacaaacattaactcaagatggattaaagacttaaatgtaagacctaaaaccataaaaaccctagaagaaaacctaggcaataccattcaggacatacctaggcaataccattcaggacataggcatgggcaaggacttcatgtcgaaaacaccaaaagcaatggcaacaaaagccaaaattgacaaatgggatctaattaaactaaagggcttctgtacagcaaaagaaactatcatcagagtgaagaggcaacctacagaatgggagaaaaattttgtaatctatccatctgacaaggggctaatatccagaatctacaaggaacttaaacaaatttacaagaaaaaaacaaacaaccccaccaaaaattgggcaaatgatatgaacagacacttctcaaaagaagacatttatgtggccaacaaacatatgaaaaaaaaagttcaacatcactggtcattagagaaatgcaaatcaaaaccacaatatgataccatctcatgccggttagaatggcaatcattaaaaaagcaggaaacaacagatgctggagaggatgtggagaaatagaaatgcttttatactgtcgttgggagtgtaaattagttcaatcattgtggaagacagtgtggtgattccttaaggatctagaaccagaaataccatttgacccagcaatcccattactgggtatatacccaaaggattatatatcattctactgtaaagacacatgcacacatatgtttactgcaacactattcacaatagcaaagacttggaaccaacccaaaagcccattaatrttagactggataaagaaaatgtgtcacatatttactgtggaatactatgcagccataaaaaaggatgagttcatgtcctttgcagggacatgggtgaagctgaaaaccatcattctcagcaaactaacacaggaacagaaaaccaaatactgcatgttctcactcataagtgggagatgagcaatgagaacacatggacacaggaagaggaacatcacacaccaggggctgtttgtgggttgggggttaggggagggataacattaggagaacaacctaatgtagatgatgggttgaygggtgcagcaaacaaccatggcacgtgtatacctatgtaacaagccttcacgttctgtacatgtatcccagaacttaaagtataatttaaaaaaaagatgctggaaaatatttagagaaatrggaagatggtcatgatatgttttctttttaaagatagtgtaaaaaacagtactacaggtagcataataccaatttttagaacatatattaatatatctayattcaaaatatttatggtartatctgggtagtaagattactggtgattttccttttttttttttttacttttattttagtttcaaggatacatgtgcaggtttgttatacagataaattgtgtgtctcgggaggcatcactactcacaatagctaagacatggaatcagcctaaatgcatatcagtggtagactgcttagataaaatgtggtacgtatataccatggaatactacacatccattcaaaagaataagataacgtcctttgaagcaacatggatggagatggaggccattatcctaggtgaactaacgcaggaacagaaaaccaaacactrcatgttctcacttctaagtgggagctaaacattaaatacacatgaacacattttgtttatttattcagcatcattttttgttctgtttcagtttggctcccactcttcatgccagtatatctcaaactgccatccatgcaagcgatgtacctccaaagatattgggtggtgagtaatgtggctcattctccgaaactagaccaagtagaagagggaaaatgaaaatgctgtgtcctctccagatacagcttccttgaataacmgggcataagatttagccagaacatgaagggatcccaggccmatgaagaggaaatgaaatcatgttcagggtgtataactttcaagtgcttttctctgcaagacatcrcctgggttagcagcttttacatctgatatttcatcacatttggcctttactatggaatcttcgggaccatgttgctcatatatttggtcaagtaagaatactattttattccagtaatccagaagatcctcatcctttccctatcagagctatttgtcattagctttaagagagattagattatgacatcatgccccatttcttgcagctggggtgtttttaagcaaatgtgaaaaaaaaaagttgaaatagttgaataagacgagctctttgcaaaaaaaatttgcccaatctccattttttacccacttcctggattcctaattgaagcatttcagttgaaccctaagtccttaaaattgtaatctaggtagacatagtaatccctaccaaagaatgacagggaaggatttttttttaagttcttttatgactagaggttttcccaaagcaaaacgacttccaacgcatttttgcttgaatagtcctctccagttttccaatgtaatcytccctcattctgttgccacgttattctaagtcctaaataattataagaataattgtagctactatgcatcagacactttgttaaaggctttacrtgcattatcttatttgatttaatcctcacacaactctgcagtgtagatagtatcayggtcatttttctgctaaaggaactgaagtttaaggagattaaatcatatgcccaagggcatktaagagcaagtaagagccaaggccaatgccaaaacagaacttgaatccacctcttatctgaggacaaagcctaggctgtcaaccagtttgcatatgcccttaaatttccctagtggttttgatctttgcactagagctacagaaaactttagaggctctgctcctatacatttggcagtcatgtggctgaatgcttagagtgtcatctcttgatataaagatctttcaaataagaaaaagaaagaccaccattttactggaaactttgagtctctttcatttcctccaatgatcaaccagctctactaggggttatgcaagtccagtgcttgctactgamacaccccaaacagtcatcactccctccttttattcctccaaaaggtttcttgaaagtccttggattgkatatgttacccagatgagccacrtaacaatgagaatgagcacagaggagaaccgggactggctcaccactcaggtaatgatggagttcctgggggagaatctttcaaaccacactgacttagaaccaggtccctcccttgacatggggattatggggattataattcaagatgagatttgagtaggaacacaggcaaactgtatcaatggacaatttgatgggaagagggctaggaaatgggtgctagttgactggttggggaagaaattataggggtgtggaaaatgttcccagtccacctttgggtggggccacaggacccatcgagtcatgagtcatgcatgggtccaagtggggacagtctgaaaaacatctcaaaaaattaatcttaggttctataatagtgatattatctacaagcacaattgggaaagtcacaaatcctgtcacctctggccacatgactcctgagcagtaaagaattatagaaactatgcctccatcttagcagaattcaggcccctctcacaatcctaacattatggccttttattagttacacaaaagcagtttagttttgggaatggctactgtcatcctttctttaaggttaaactacaaaataagttcctcccaaaggtagcttagcctacacccaggaattacaaaggacagcttggagatcagaagcaagatgtagtcaactatgtcagattttttcttactgtcataattttgcaaagatggtttcaaatattttctttgtttgacacttgggctcatttataactaatataagctttttctttgcaggtcttggccacctgtaatactgaatagtcctttttcaatgactgattcactgggcacctgaacttccaaatcgagcaccagtgagtaacaagaatagtccttagtagagcaagtgcagtcacttataacacccccaaatataatccagatcaggccctaggctcaaggtctcagaggggaaaaaaagaaagagcattttctacaggctgctatctttctattagcaatgatggggaagaaaggaaggaaggagagagagagagaaagagaaagtaaaaaagaaaaagaaagaaagaaagagagagagagatagaaagaaagaaaaagaaagaaagaaagaaagaaagaaagaaagaaagaaagaaagaaagaaagaaagaaagaaagaaagaaaggaaggaaggaaggaagaaagaaagaaaaaagaaagaaagaaagagaaagattgattgtgagtaactagagtgaaatcttggaaaagtgccactgattccattttcagatacctgcaggcttgagaagtgggtaaccaagttgtgttgaaatttaatttaaatgtctatctctttagatctgaagttacaaaataatcaatgataaaacccattccctgatgcaatattcaaatggtattggcaatactttaccaatgagtcagttaggtggccataaaataaagagaaaatgataacacttggagagtcaatctccagaatatttaagggagagactgtccacatcctctttacctaagccatgtttaggatagtcagagaaggaaagagttcttatacctgctcatataattttctcatcctttccttcaagttattccttaaaaacctcagccaaacaaaaaaagactattattcacattttatcaagaggaagttaaaacccaagaaagtcacctgggtgattagtggaaaaccttagataaaaacccgtatctcctcactccttattcctatcccaggactttttcctatatgccatgactagaacttattgaatattcatctcttcatgggataggaattagatggtgtttgggaacctccacctagtctctttgctaaaacataacgagagtcacctttattccagttcccaagaagttcctgatcttcatctgagaccacctcagcctggaccttattgtccatatcgttatcagcattttgggcaaagccattcaacaagtctctaggaagttccaaactttcccacattttcctgccttattctgagccatccaaactgttccaacctstgcctgttacccagttccaaagtcgtttccacattttgaggtatcttttcagcaacatcccacttctggttccaatttactgtattagtctgttttcacactgctgataaagtcatacccgagactgggaagaaaatggggcttaattggacttacagttccaaatggctggggaggcctcagaatcatggcgagaggcaaaaggcacttcttacrtggcagtggcaagagaaaatgaggaagaagcaaaagcagaaacccttgatmaacccatcatatctcgtgagacttattcactatcatgagaatagcatgggaaagactggcccccatgactcaattaccttcctttgggtccctcccacaacacgtgggaatctgggagatataattcaagttgagatttgggtgggggcacagccaaaccatatcagatggatagagagaaagagagacacaaagacagagacagagaaggaggacaggggtatcttcagctcccctaggtaattcaaagtgatagacaatccataccttcatctgaactggccaaatataaacatattcgatgaagataacatttattctgttagcatttcccaaacattcaccacccacctggcttgcagaggtgttaagagacaagcgtattttggaaggagtttttgaacttcccagaacagcagtattgtgcaaggtcaaggttgggtctgcattgctgatatagttttatttggtaacagaaggaagaaaactcaaagtttttctttaggtctaaattttatatctcttgtgtgtttctccagtctgttccccacaatgccacgccataattatcacaaagtggcgcctctggtgaggtcactgtgtgccaagcacggattgcactatgtgaataaacccatgttgagggcatttggagatattgtcaggtaataacataatttctctcagctcacagctctcatttgtatttactgccactccccagactattcagtggcttgtgaatcattcatataacaaccatttattaagggtcacctgtgtgctcagcatggatacatggcaccatagggaaccgtatcaacaacaacaaaataataataatactgaccttttacctataggtacagcttagcgaaaatgctttactgtcctactaaatttcaaatttcttaaagtcaaggctgtatattatttgcctttttatcccccacagagcttcctacaaatgttagaatttaagtagtgggagacactgtcagatcatctggtccagtgttgcaaatttagatgcctgcagggttcagtggggtataaatgtgcagctcaggctggggtgattaattaagagtagtgaggcatgcagaaactgaaaatccatactcatccttaggcattcatatataatttcctaaaaaatgttgtgctggttaaattaacaaccagtaacctgggtttaataaatttctctttagtttagggttgaaaaaaaaaatcttaaatgagaccaacaaggccaggcctgatctgatctgatctgatccctaaccagtgctccagctccagactctctaccacactcctcctctttctctatcctccagataatttcctccagaaattaatgcaattagcctaccttaagttgctgtgaaactcccttccctagttgtcttatycttttgccactttttcttctgcctggaatgttcctccaaacctccacctcccctgacatcatcttgtcaattgccattctttctccaaggctcaactcaaatgccttttcctcatgtctatctcctctgacccctaaaactaaattagtcacatgctcttgcagcacctgcttctcttcatttgtgaagtttatcacaattgtattcagataacatattgggtaataaattatttaatatgtgtctcccaagctagacctggaatttcatgtggacaggactcacatccaccctactcattgttgtcccaccagagcctagaaaaatgtcctccatattataaaatagggttgacaggtaaatataggatgggtggatttacagatatataggctcagaaaagaataaaatgaaagaaaatctcaatgttctccataaagaaaaggtgaattcacctgctaaaaacaatttagtcaacagaattgatcaacagaggatgacatttatcagatatagctggaaatgacattgttctgaaccaggcagaggagcaaattccatgtaggagctttcttaacattacagtctcacctcctgatgatcttgtttattcctttcacagagccttgaagaaatctgctgccctctgggcggatgcttactatgaaacatgatgccgaatgtcagccttgacacacatgtaattgcatctctgatgagggttggtgcatgtgcaggagctcttccctgcttaactgggaattagttatcaccactggtatacctgactgtgctgttctaggaatatgaatcccaagcacatgtgataaccccttctctgaaagtcttctctgcaaataagaacctaggaaacacaagatgacattgaccagggtgacaaaagggaaatggagcccaatatttttgttttttcattagtaccttaaactcagtcctcccaatagactttagtcagatcatctcagtcaagggccagaagtacaagaaccaggcaaaagttttatggatgaagtggacatagggagaagtcagccaaaagagagccatctaacagggtactttggaaattagtgcaattgctcttagaaaagaatcatatgtttaagaatttcctgttgaagcacaaacgctttttacttatttcttttcagatgtgtgaacttctttttctttaaaaaactgagtataattaacaataaaatttcttaaaatatttcaaaattgacttcagatcttcattattgtaactgcacatgtgtcattaatgcatatacacattttctttccaagtggaaaaaataaaaagtctatgaaatatcttaaaagaacttcctacatctagtcctaatagcaacagatcaagcaggttaatgttctgtatttaaagatgtgttgtgtttcactaaagaatagactgcgttttaagtataagattttgttgcctactccctacccaccatgcagaactactgtaccttgtaattgagttaccctgatgaaagaaagagttttgttttctctgatggaaaccccaggcattgacaaggcagttttcaagtttgacaccaaggtaagcatgtcttagaacaagagggctttctctctcacaagagagttttagtgctagaaggataagtggatactcttagtaacatactgatctctagtgtctatacttttattcaaggttaccttagctgcagaaagcacaatagtgcaagcttgcttccccagctccaagcaaatcggcgctactggattatctgttgcctgaaattctaccagtatayattcattcccttacttcaagctctgcaaaatactcttttagctttgtttgtttctcaattaaacccctactggaaaataacacattaaatcactcatagctcctggggacttagccacacatgtcaaagttaagaaaacaaaaactggttgtctgggaggaagtggcattattaaaatgataatggctaatatcaaataggaaagttggggaggagatgaaaagaataaaaagctattttgacttcaagactcttcataataggcaggcaagtgcccattttcctcctgctggtggattctagatgatttctcctgcctcaattcagggttacaagtgggagcgggctcaatggttcgctttttctgtctcccttggtccaaaccagagactttcaagcactgcttgttctcctgattacttagaaatagcaacccgactctccttaggcaaatttactatctcaaacgtgttccccactcagtgttataaatagcccaccttgtaaatctccaaacagacttggttactgtgtaatctgaagaaagttgggagatttagacagattatataaggaaacatgaaatcaattcaaaaaagktgcttgggccaggctcacatctgtaatctcaacacttgggaggccaaggcaggaggatctcttgagcccaggagttcaataccagcctgggcaacatagagattttttgagcaactagagttttgttttttttagagattctgtctctaaaataaataaataaatacataaaattcataattcaaaaaagrtgctagaccatccgattctgggctcttctttgctgggaggtttttgattactgcttcactctccttaatcattattgacctgttcagattttctttcttcatgattcagtcttggtaggttgtatgtttctagaaatttatccatatattctaggttactcaattcgcttgtgcatagttgttcacagtaggctcttatgatcctttgtatttctatggtttacaaaaatgtgcaaactaaacaatgtgctgtttaaggattcataaatatgtagtaacatgataaagagaagcaagagaatagtaracacaaaaatgaggatcatagtgggggaaaggtgctaggtaagaatgaaaatgtataagtgaggtaaattttaatttgcttagtaggctgttagttaatgaaaatgatcatttttctgaactcactatctcaagtgatgtctctctctcaccctgtggtgactggcatttgcatttggtgaggcattagccatatttttattgcttgttcaatatactttccagaggaggagaaccaaagcctactgctttcacagctttgaataccactgagcactgagttaaattcagatgactgatcctgcaggtcattttatttctaaccttcaggctatagggctctgctttatgggcatagaaatgaaagtggcttcatcaaccaggctcatgtctctttaaactagataactcctggcagttatgttatagccctatctgaaactcttcaatggattcccatgactcttggaataaagtccaaaccccargactgccccatggccactacccaaccttgtaccactctggctcttgctatctctgtttcagcccactggatctcttcaagtcttcacactcttttctgccacaggctctttgctcctgatcccaatggctgagccattttgtcaactccctgccctcactccatctcacctggtcaatccgccactcactttcagatctcagcactattatcacatctcagcatagctttatccacaatcccagagtgcttcctcactaagtcaagccttcctgtgatacactctgtagcaattaccatgggtataattttacattaatttatgtggtgtgttaatttctttgtctccctctctagcctgcaatatccatgaagcaaggatttcttgacatgttagagacactcagtaaagatgtgcgaaatggaggaagaaatgaatggatggatggatgctaattctaagggactacagcaaaaaaagtcctccttggcctctctcatggaaatccatccttttgtttaacaactcaccaaaagaaacttctcctgctccttcattttttatgtctgtaccttaagcttaactatatacctagaaaatcatttaaagttctcttattgcaagaattttctgattccaaaaatatgtttatgtaatttcttccaactagataaattttattaaatatatgagaataattccatattctaattttgaattgttttaattttatcatggtaaaaacacttwttatgagccgggcatggtggttcacgcctgcaatcccggtactttgggaggctgaggggggcggatcacgagatcaggagatcgagaccatcctggctaacatggtgaaacccgtctctactaaaaatacaaaaaaagaaaaaattagccaggtgtggtggtggacgcctgtagtcccagctactcggaaggctgaggcaggagaatggcctgaacccgggaggcggagcttgcagtgagccgaggtcgcaccactgcactctggcctgggagacagagccagactccgtctcaaaaaaaaaaaaaaaaaaaaaaaamcrtttattatgacatctatcctattaacatttttaagtgtacaatacagtattgttttctataagcacaatattgtgaagtctatctctagaacttatttatcttgcataactgaaattttatacctgttgattggtacttcccattttccccttcctccagtccctggcaaccatcattctattttttgtttctatgccgaaggagtttgactattttagataactcatgtaaatagagtcctagagtatttgttcttctgtgactggcttatttcacttagcatcatgtctttaagtttaatttatgttgttgctattacaggatttcctctttcttaagactgaataatattccattgtatgtatacaccacatctttaattcatttacccattgatggacatttagattctttcctcattgtggctattgtgaatgatgttgcaatgaacatcagaatgctaatatatctttgagattctgatttcaatttttttgataaatatccagaagtaggattgctagataaaattatttaattataaggatctaccatcaataagtactgatatatgccctttatgggcattattgcatttaatcctcaaaacaggcccattgggcataggtgctataattaacctcattttttagatataaaacctgaggcttagggaggccaagcaatttgcctgatgttgcaggtagaaattggtggagtggagtttcagacccaggaatctctaactccacagtcaatgctctttaattcccatgccaggaaatccaaagtaaaaggaagtagcataaattccagccagggaaaattcatcttctttacagctatcttcaaatggctttccctgatccgattttctctaaagctttactcttcttggaagaattaggtaggaagaatttgtctgcatttttagttggacatcaagtaagagtgcctggattagaagtcagaaatctagactctaatttcattttattaacttagtatcctacagtgaacttggccrtgtcacttccacgcttcatacctcaatccccacatttgtataggtgcgatgcataatatttcctggcctatgtgcatcataggatgattgtgacaattacatgaagtaagacaaatgcaatggttttataagctggcaacaccaattcacattctagttactgatattcttgtaatgagggttcttcccatccyagatccacaaaaagcatgaaaggccacagagtcaccgagacctacaggatggaaagacactgaatcattttaacaatgacagggtacctttccccagaggcttatgagagrcgtawgactcacaagtgaaaaaatgatttctcttgttgcaacaagtaacatcggtgagtcatcttccacctctgactgtaattaatcccctggtaccagcctgcagatatcagaggctgtggggcaggtagcaggaagccaagattctagttatccaaacttctgattaaccatgtgagtgcaaaattcttattgttggaaatcttaccaatggcatataatataatatttgttgcctagtcagtgtaaataaaggaaggttttatctgctttcttgctagtcagagacacttctggcacaatcctaaaagtgcagaatgcataggaaattaaacttgagctctattgaaggcagggatatactcagttatattttctttcccagaactgtttatgaaagtttgaaaatacagcaatgttgaaataattttatagtgaatatctatatggccatcacttgatttcaacattactatttcagtaaatttcctccatcccgtgtctattcatctacccatctctcaatatatccattaatccactttatttttatgcacttcaagtaaatttcctgagggtacttttaaaactaaacatcaaataatttagacaacaaagtatctttttcctcttcaataaagaattgatacaaattcagaacactaacaggaaaattctagacttaagcttgacacttgaccaactggacctcataaccatctacggaatattccacccagcaaccacagaatcacgcaatatatctttataacaaactgtacatgtaccccagaatctaaaatagaagttgaaaaacaaagtggcaaaaattgtgtagcagccgcatctctaagaaaacataatgtagttatcatttctgaaaaatcaattattaactccccacagaatagaccttctcatatatagagagctatcatatatagatatatgtagatatctatatatattctcatatatacttatctctcatatcagagacatatctagagagaaatatctatgtatctatctagagatatataaatagaaaaatagatgtctatatataaaaatatatatagatatatagatataacagagagatatatgagatatatatatataacttcatgatccttcatatatatctttattattctctttcatttgcaacattaattgagcacttaccatttatcaggcattgacctagrtgatgtgaatgaagagtcagaagccctacctctaggagtttatattctagtgcagaaggcagtcaataaacaagtaaatggaagaaaaaacaagatgattacatttaaagaaaataaataggatgaggtgagagagaatgataagcaggggactagattagttcagggggtcaggcagaagggaatctgagaatattgaaggagcctgccatgacatcctgagaagcagaatcatcaaaggcaagtgcaaaggccctgaggcaggagcaaatttctgttcggacagcagagtaggaggcctatgtgactgtagaactgtttgcaaggtggtttcctcactatcacttaaatttcattcctccataagtatggttggccttggctttttgacagcattcgaaataatttcctattacttatataagcatagttttctctggacactcatcccagatttaaattaccaggttaatattccctttataagcttttgtgccctgtgcacctcactgatacaaatgatctctgcctgtgccactcacragactgaaaactccatgagagcagtgattctgtatgctgttattcaccatttcatccctagcaatgtatccctagcaatcaaatccttagcattttatcctaacaatggactggggtccactgtttggcatagagacatagagtggatgttcaataaatattttagtaatgattagtttgttagttaattagagcaatgatagataagcctagmaagttaaactgagctcgtattgggaaaaaaaatctaaaattctagctgaaaagtttgtgcttggtttagtagaccagatgggtccatagagaagaatgcaaagaaacctgacatgagatcctgatgggcaagatcatgagaggcaagtgcaaaggcctgtgagctaaggagtagtttaattggaattgagctctggaaaaacctaacttaaaaccacacaaaggaaagactggaagagtgaatagcgtggaggtggagagatcaatgaagttcctattgtgaaacctgggtgagagataatgagtttggctgataataaaaatatgcaatgtaagggaatacacagagacacattgtggatactggatccatagaatatggtaagtaattaaacattcaggggaacccaaagacaccccaaagtttggattgtaggtggcagcaaagtagaggatgaagaaaactagaatgtgaagcaaaagcgaagggctgcttttaagcaccttgagtttatggtatgaaaagaaaacctaaatgaagatgtctagcagataattggaaaaaatgtccttctggattwtttttttttatactttaggttttagggtacatgtgcacaatgtgcaggttagttacatatgtatacatgtgccatgctggtgtgctgcacccattaactcttcatttagcattagatatatctcctaatgctatccctccccactccccccaccccacaacagtccccagagtgtgatgttccccttcctgtgtccatgtgttctcattgttcaattcccacctatgagtgagaacatgcggtgtttggttttttgtccttgcgatagtttactgagaacgatgatttccaatttcatccatgtccctataaaggacatgaactaatcattttttatggctgcatagtataccatggtgtatatgtgccacaatttcttaatccagtctatcattgttggacatttgggttggttccaagtctttgctattgtgaatagtgccrcaataaacatacgtgtgcatgtgtctttatagcagcatgatttatagtcctttgagtatatacccagtaatgggatggctgggtcaaatggtatttctagttctagatccctgaggatcttaaaaggaaaataaggacaaaagataccaacttgagcatactccccgaagagttaactgaggaaaatagtagagaaagagacttgatttgacagagaatcttaaagctgttttcactgcagaagagagataagaaagcaggaccagtagtgataaaaaaggattaaccgagacctagcaggaaacataagacagtgtatgatgcagaaggtgggagaggagaaagtttagaggtatggctaataagcaaagacacatcctgagagaaggcattatagatgcaagcccatttaatttcatgtttgaccaactttgctcagtttgaaaaaattgagttgggtttataccaagcaggaactaaacatccagactgacgaatgtatagtggatatgttgctactatatcctaaaaggattattttgctaatgtttgaaagcttctcatcattttaaaaaacacagagagagatcttaatttgcacactgcaaaaaacaagttttatgaaatagcacaaacataaaattgtaaagtttatgtgaaacattaagggtaaatggaataggatccccttctccctgatgaccacctggaaacaatggctgtcccagacccctcttgactcaactgagagaggaggggatcaatatttcagtaaattagggtctcccaggatgcaggttggaaagttctggtctataccactgaaagggcacatgtccagattttcctgctaatcctacargcacaagataatattcggccagttaacctgcatcagttgttaaaatactgagatactaccatgtcagccagtaaatagccactaccctaaatcctacaattcctgccaacctaatccttttgccaagaggccctgaccctcatcccagcctgcgaccaaatgggkgtgggtggtagttgaaaagcttatttacaaataaagaaatagcttatttacaaagtaagaagaaagcttattcacaaaagacaaatatgctgtccaaaacaraattcaaactctaggcttcaaattagttgagtctgactacctcaacatggcctattttaaacctcccaattaagaaaaacaatcaaagccagaatatgtcacaacatagtgacaaaaacaatacatatgaggccctttaaatttgcccaaattattgcaaaaatctgaatgtccaaattattgcaaaaatatgaatgtaagataaataaatgcattgccttaaaaagcctcttatgactcaggctattttttctaccctatattcccatatttgttacattttatggcacttaaaaaaacacttatttctatcattagctaccctctttataccgcatctgactccttcttgcctaggaaaaagggaactcttgcaattattttctatttctatcttcgataaagataatctagaaataggtggacctaaaagcctagccagtgatcatttatttgcaaaaggcataccattcattttgttcaggtgaataactttatttttttttaattttattattattattattttttattatactttaagttttagggtacatgtgcacattgtgcaggttagttacatatgtatacatgtgccatgctggtgcgctgcacccactaactcgtcatctagcattaggtatatctcccaatgctatccctcccccctccccccacccaccaccgtccccagagtgtgatattccccttcctgtgtccatgtgatctcattgttcaattcccacctatgagtgagaatatgcggtgtttggttttttgttcttgtgatagtttactgagaatgatggtttccaatttcatccatgtccctacaaaggacatgaactcatcattttttatggctgcatagtattccatggtgtatatgtgccacattttcttaatccagtctatctaaaatcagagcagaattgaaggaaatagagacacaaaaaacccttcaaaaaatcaatgaatccaggagctggttttttgaaagaataactttaaactacagaaactcaatgggaattcaaagggaggtcatgaaagctttgagtcaagaaaagaaattktttgcagaaaagctttagtacacaggttgtacatcgcatcctaatggtgtgaatgcaataaagaaaacaatttgtggtcatttttataacctaccacaccatggtagatttctactcagagtaaattgtttttcaactgacacccagatcaggatataattcattctaccatagctgtgtaaacgaaaaccacttaaatgaaatctctgttaagagaaggatgacttttccgctcattattgtattcccagtatctgttaattgtcaggaatttaataggtggtaattaaaatagctgtttaattagtgaacaaggtctgcacatggaaaattcgaatgttatctactaattacaaaacttactagctacatttcattacagcaaactgtttagcagtccatgttttataaagacttcctaggtccagtaattgtatccaaaacattacaacagaagctcaaatctccaaccaaaacttgaagtcaacgattagcaaagatggctaattttatttattttattttattttatttattgtattttattttttgagatggagccttgccctgtcacccaggcaggagcgcaatggcccgacctcggctcactgcaacctctgcctcacgggttcaagcgattcttcagcctcagcctcccaagtagctggaattacaggcatgcaccaccccatctgcctaatttttgtattttcagtagagacagggtttcaacatgttggccaggctggtcttgaactcctgacctcaggagatctgcccaccttgtcctcccaaaatactgggattacaggcaggagccaccrcgcccagcctcagctaactttattttttttctattatactttaagttctagggtacatgtgcacaatgtgcaggtttgttacataagtacacatgtgccatgttggtgtcctgcacccattaactcgtcatttacattaggtatatgtcctaatgctttccctccctacttctcccactccatgacaggccccggtgtgtgatattccccttcctgtgtcmaagtgttctcattgttcagttcccacctatgagtaagaacatgcggtgtttggttttttgttcttgcgatagtttgctgagaatgatggtttccagcttcatctatttccctacaaaggacatgaactcatcattttttatggctgcatggtattccatagtgtgtatgtgacacattttcttaatccagtctatcattgttggacatttgggttggttccaagtctttgctattgtgaatagtgtcacaataaacatacgtgtgcatgtgtctttatagcagcatgatttatagtcctttgggtatatacccagtaatgggatggctgagtcaaatggtatttctagttctagatccctgaggaatcgccacactgacttccacaatggttgaactaatttacagtcccaccaacagtgtaaaagtgttcctatttctccacagtctctccagcacctgttgtttcctgactttttaatgattgccattctaagtggtgtgagatggtatctcactgtggttttgacttgcatttctctgatggccagtgatggtgagcattttttcatgtgttttttggctgcataaatgtcttcttttgagaagtgtctgttcaygtcctttgcccactttttgatggggttgtttgtttttttcttgtaaatttgtttgagttcattgcagattctggatattagcmctttgtcagatgagtatgttgcaaaaattttctcccattctgtaggttgcgtgttcactctgrtggtagtttcttttgctgtgcagaagctctttagtttaattagatcccrtttgtcaattttggcttttgttgccattgctttttatgttttcgacatgaagtccttgcccatgcctatgtcctgaatagtgttgcctaggttttcttctagggtttttgtggttttaggtctaacatttaagtctttaatccatcttgaattaatttttgtataaggtgtaagggagggttccagtttcagctttctacatatggctagccagttttcccagcaccatttattaaatagggaatcctttccccattgcttgtttttctcaggtttgtcaaagatcacatagttgtagatatgcggcgttatttctgagggctctgttctgttccattgatctatatctctgttttggtaccagtaccatgctgttttggttactgtagccttgtagtatagtttgaagtcaggtagtgtgatgcctccagctttcttcttttggctcaggattgacttggtgatgtgggctcttttttggttctatatgaaccttaaagtagttttttccaattctgtgaggaaagtcattggtagcttgatggggatggcattgaatctgtaaattaccttgggcagtatggacattttcacgatattgattcttcctacccatgagcatggaatgttcttccattggtttgtatcctcttttatttcattgagcagtggtttgtaggtctccttgaagaggtccttcacgtcccttgtaagttggattcctaggtattttattctctttgaagcaattgtgaatgggagttcactcatgatttggctctctgtttgtctgttgttggtgtataagaatgcttgtgatttttgtaccttgattttgtatcctgagactttctgaagttgcttatcaacttaaggagattttgggctgagacagtggggttttctagatatacaatcatgtcgtctgcaaacagggacaatttgacttcctcttttcctaattgaataccctttatttccttcttctgcctaattgccctgtgcagaacttccaacactatgttgaataggagtggtgagagagggcatccctgtcttgtgccagttttcaaagggaatgcttccagtttttgcccattcagtatgatattggctgtgggtttgtcatagatagctcttattattttgagataggtcccatcaatacctaatttattgagagtttttagcatgaagggtggttgaattttgtcaaaggccttttctgcatcttttgagataatcatgtggcttttgtctttggttctgtttatatgctggattacatttattgatttgcgtatattgaaccagccttgcatcccagggatgaagcccacttggtcatggtggataagctttctgatgtactgctggattcggttttccagtattttattgaggatttttgcatcaatgatcatcaatgatattggtctaaaattctcttttttggttgtgtctctgcccggctttggtatcaggatgatgctggcctcataaaatgaattagggaggattccctctttttctattgattggaatcatttcacaagtaatggtaccagttcctccttgtacctctggtagaattyggctgtgaatccatctggtcctggactctttttggttggtaagctattgattattgccacaatttcagatcctgttattggtctattcagcgattcaacttcttcctggtttagtcttgggagagtgtatgtgtcaaggaatttatccatttcttctagattttctagtttatttgcatagaggtgtttgtagtattctctgatggtagtttgtatttctgtgggattggtggtgatatcccctttatcattttttattgcatctatttgattcttctctctttttttctttattagtctttctagcagtctattttgttgatcctttcaaaaaaccagctcctggatttgttaattttttgaagggttttttgtgtctctatttccttcagttctgctctgattttagttatttcttgccttctgctagcttttgaatgtgtttgctcttgcttttctagttcttttaattgtgatgttagggtgtcaattttggatctttcctgctttctcttgtgggcatttagtgctataaatttccctctacacactgctttgaatgcatcccagagattctgctatgttgcatctttattctcattggtttcaaagaacatstttatttctgccttgattttgttatgtacccagtagtcattcaggagcaggttgttcagttgccatgtagttgagcggttttgagtgagattcttttttttttattatactttaagttttagggtacacgtgcacattgtgcaggttagttacatatatatacatgtgccatgctggtgcgctgcacccactaactcgtcatccagcattaggtatatctcctgatgctatccctcccccctcccaccaccccacaacagtccccagagtgtgatatttcccttcctgtgtccatgtgatctcattgttcaattcccacctatgagtgagaatatgcggtgtttggttttttgttcttggcgatagtttactgagaatgatgatttccaatttcatccatgtccytacaaaggacatggactcatcattttttatggctgcatagtattccatggtgtatatgtgccacattttcttaatccagtctatcattgttggacatttgggttggttccaagtctttgctattgtgaataatgccgcaataaacatacgtgtgcatgtgtctttatagcagcatgatttatagtcctttgggtatatacctggtaatgggatggctgtgtcaaatggtatttccagttctagatccctgaggagtcgccacactgacttccacaatccttgaactagtttacagtcccaccaacagtgtaaaagtgttcctatttctccacatcctctccagcacctgttgtttcctgactttttaatgattgccattctaactggtgtgagatggtatctcattgtggttttgatttgcatttctctgatggccagtgatratgagcattttttcatgtgttttttggctgcataaatgtcttcttttgagaagtgtctgttcatgtcctttgcccactttttgatggggttgtttgtttttttcttgtaaatttgtttcagttcattgtagattctggatattagccctttgtcagatgagtagsttgcaaaaattttctcccattttgtaggttgcctgttcactctgatggtagtttcttttgctgtgcagaagctctttagtttaattagatcccatttgtcaattttgtcttttgttgccattgcttttggtgttttagacatgaagtccttgcccatgttgagtgagattcttaatcctgagttctagtttgattgcactgtggtctgagagatagtttgttataatttctgttcttttacatttgctgaggagagctttacttccaagtatgtggtcaattttggaataggtgtggtgtggtgctgaaaaaaatgtacattctgttgatttgcggtggagagttctgtagatgtctattaggtccgcttggtgcagagctgagttcaattcctggttatccttgttgactttctctctcgttgctctgtctaatgttgacagtggggtgttaaagtctcccattattaatgtgtgggagtctcactctctttgtaggtcactcaggacttactttatgaatctgggtgctcctgtattgggtgcatatatatttaggatacttarctcttcttgttgaattgatccctttaccattaagtaatggccttctttgtctcttttgatctttgttcatttaaastctgttttatcagagactagatttgcaatccctgcctttttttgttttccatttgcttcgtagatcttcctccatccttttattttgagcctatctgtgtctttgcacgtgagatgggtttcctgaatacagcacactgatgggtcttgactctttatcyaatttgccagtctgtgtcttttaattggagcatttagtccatttacatttgaagttaatattgttatgtgtgtatttgatcctatcattatgatgttattttgctgattagttgacgcagtttcttcctagtctcgatggtctttacaatttggcatgtttttgtagtggctggtactggttattcctttccatgtttagcgcttccttcrggagctcttttagggcagtcctggtggtgtcagaatctctcmtcatttgcttgtctgtaaagtattttatttctccttcatttatgaagcttagtttatctggataygaaattctgggttgaaaattcttttctttaggaatgttgaatattggcccccactctcttctggcttgtagagtttctgccaagagatctgctgttagtctgatgggcttccctttgtgggtaacccgacctttctctctggctgcccttaacattttttccttcatttcaactttggtgaatctgacaattatgtgtcttggtgttgctcttctcgaggtgtatctttgtggcgtgctctgtatttcctgaatctgaatgttggcctgccttgctagattggggaagttctcctggataatatcctgcagagtgttttccaacttggttccattctccccgtcagtttcaggtacaccaatcagacatagatttggtcttttcacatagtcccatatttcttggaggctttgctcatttctttttattctttttactctaaacttcccttctcrcttcatttcattcatttcatcttccatcgctggtaccctttcttccagttgatcgcatcagctcctgagacttctgcattcttcacgtagttcttgagccttggttttcagctccatcatctcctttaagcacttctctgtattggtttttctagttatatattcttctaaatttttttcaaagttttcaacttctttgcctttggtttgaatgtcctcccatagcttggagtaatttcatcgtctgaagccttcttctctcagctcgtcaaagtcattctccatccagctttgttcggttgctggtgaggaactgcgttcctttagaggaggagaggcgctctgctttttagagtttccagtttttctgttctgttttttccccatctttgtggttttatctacttttggtctttgatgatggtgatgtacagatgggtttttggtgtggatgtccttcctgtttgttagtttttcttctaacggacaggaccctcagctgcaggtctgttggagtacccggccrtgtgaggygtcagtctgcccskgctggggggtgcctcccagttaggctgctcaggggtcaggggtcagggacccacttgaggaggcagtctgcccattctcaggtctccagctgcgtgctgggagaatcactgctctcttcaaagctgtcagacagggacatttaagtctgcagaggttactgctgtctttttgtttgtctgtgccctgccccagaggtggagcctacagaggcaggcaggcctccttgagctgtggtggtctccacacagttggagctttccrgctgctttgtttacctaagcaagcctgggcaagggcaggcgcccctcccccggcctcactgccaccttgcagtttgatctcagactgctgtgctagcagtcagtgagactctgtgggcgtaggaccctccaaaccaggtgcgggatataatctcctggtgcaccatttttttaagcccatcggagaagtgcagtattcgggtgggagtgacctgattttccaggtgcygtctgtcaccactttctttgactaggaaagggaactccctgaccccttgcacttcccgagtgaggtgatgcctcgccctgctttggctcgcacatggtgcgctgcacccactgacctgcgcccctgtctggcactccctagtgagatgaacccggtacctcagatggaaatgcagaattcacccatcttctgcatcgctcatgctgggagctgtagcctggagctgttcctattcggtcatcttggctcctctctccttgagtgagtttcttaatcctgagttctagtttgattgcactgtggtctgagagacagtttgttataatttctgttcttttacatttgctgagcagtggtttacttccaactatgtggtcaattttggaataggtgtggtgtggtgctgagaaaaatgtatattctgttgacttggagaggagatttctgtagacatytttaggtccgcttggtgcagagctgatttcaattcctggatatccttgttaaatttttgtcttgttgatctgtctaatgttgacagtggggtgttaaagtctcccattattgttgtgtgggcatctaagtctctttgtaggtctctaaggacttgctatatgagtctgggtgctcctgtgttgtgtgcacatatttttaggatagttaactcttcttgttgaatggatccctttaccattacgtaatggccttctttgtatcttttgatctttgttggtttaaagtctgttttatcagagactaggattgcaacccctgcctctttttgttttccatttgcttggtagatcttcctccatccctttgttttgagcctatgtgtgtctctcacatgagatgggtctcctgaatacagcacactgatgggtcttgactctttatccaatttgccagtctgtgtcttataattagagcatttagcccatttacatttaaggttaatattgttatgtgtgaatttgatcctgtcattatgatgttagctggttattttgctcattagttgatgcagtttcttcctagtctcgatggttctctacaatttggcatgtttttgtagtggctggtactggttattcctttccatgtttagtgcttccttcaggagctcttttagggcaggcctggtggtgacaaaatctctcagcatttgcttgtctgtaaagtattttatttctccttcacttatgaagcttagtttggctggatatgaaattctgggtcaaaaattcttttctttaagaatgttcaatattggtccccactttcttctggcttgtagagtttctgctgagaggtcagctgttagtctgatgggcttccctttgtgggtaacctgacctttctctctggctgcccttaacatttcttccttcacttcaactttggtgaatctgataattatgtgtcttgaagttgctcttcttgactatctttgtggcattctctgtatttcctgaatgtgaatgttggcttgccttgctagattggggaagttctcctggataatatmctgcagagtgttttccaacttggttccattctccttattactttcagstacaccaatcagaagtagatttggtcttttcacatagtctcatatttcttggaggctgtgttcatttctttttattcttttttctctaaacttctcttcttgcttcatttcattcatttcatcttccatcactgatacyctttcttccagttgatcgcattggctactgaggcttgtgcattygtcatgtggttctcatgccatggttttcagctccatcagatcctttaaggacttctctgcattggttattctagttagccattcatctaatcttttttcaaggtttttaacttctttgtgatgtgttcaaacttcctcctttagctcagagaagtttgatcatctgaagccttcttctctcaactcgtcaaagtcattctccatccagctttgttcccttgctggtgaggagctgcagtcctttggagkggggagaggagctctgatttttagaattttcagtttttctgctctgctttatccccatctttgtggttttatctacctttggtctttgatgatggtgacatacagrtggggttttggtgtggatgtcctttctgtttgttagttttccttctaacagtcaggaccctcacctgcaggtctgttggagtttgctggaggtccactccagaccctctttgcctgggtatcagcagcagaggctgcagaacagcgaatattgctgaacagcaaatgttgctgtctgatcgtccctctggagattttgtctcagaggggtacccggccgtgtgaggtgtcagtctgcccctactgggggatgcctcccagataggctactcgggggtcagggacccactggtggaggcagtctgtccattctcagatctcaaactccgtgctggggtaaccactactctcttcaaagctgtcagacagggacatttaagtctgcagaggtttctgctgtcttttgtttggctatgcctttccccmagaggtggrgtctacagtggcaggcaggcctcctagaactgyggtgggytccacccagttcgagcttccttgacaccctgcttcagctcatgctccatgcactgcacccactgtcctgcacccactgtccaacaagccctggtgagatgaacccggtacctcatttggaaatgcagacatcacccatgttctgcgtcgctcacactgggagctgtagactgkagctgctcctatcagccatcttggaacagcccacctagttagctcttcttgttgaattgatccctttaccattakgtaatggccttctttgtctcttttcatctttgttggtttaaagtctgttttggctacctttatttttaaaaaatattagtctagactctgatggaagaaatatggcatcatacagagagcatttttggacagaaataacatggggaagagaatacctacacaagctgaaagacaaagaatttatttattaacccatatgtgtattccatagttgtaataaaatatagttggttgtctacccactattcattttcctttatttcttcctgaaaggactattattttgtgtggaaggtaatgcagccatataaataaagtctttwtgtccaagcttccattgtagctatggtggcacttgtcttagtttgcattcctgagatatggctgtgagtaaaggtcatgtactgggggagaaattgtagtgaagaatgaagcttacctaaagacaaatctgacctttgccctcagctactgggagacaatctctgaatcactggagtgtactgcctaataagaatgtctttctttgtttggaggctttagccactggacaatckaacaatgtgatttgtgatggggtctttaggatattctatgtcgatttatacctccagaggcactggagactgaggtattattctgaacttccaggagtatcttgaatcttagagagcagtcagtcatgtggtcagtaaataatcaagtcccaataaaaactccggacaccaaaagttcatgtgagcttcctgggttaacagtactccatgcatattgcgacagttaatggcaagaaagtaacacatctttgaggactattgtattacacgtcccacatgaggttacttaagggtatatatttgcctggttcctgaaccctgaaggctgggttgtgagctaaggccatggtgcccagtgaaggagcaggtgtccctgaaaatctaaacatcccagagactatctgagaacctaacaagaaaatcagtctcactgcattcacacagtatacaaaaggccaaaaaattaccttaaaagcagtttagagatgggaagaggcatggatctctagagctctcctgctgctgtccaagagtgtcctgtaagtcctaataaacacatctgtgagaaaacattttacatggtccattttcaagatatgataaatctaagtactggcagccagcctgcagatgtgagaaaccacacagctcatgcacctagaaattcacaataagcaaacagaatgtagaggatgggtcagcccataaaagggaagtttcattattggsaaatcaaaacttatgtggggaaggagaccagggcataaccttataagggggataatgaaacttaggcaacatccagtaagattataaccccatagtactcaaccagtgaggaactggggaagggactcgtgtgctaggagataaattacctgctgtaactgccccaggtgtgcctgyctgccagacacccaatcttgcaaggccaccattaaaagacttgcttctgctgttctttgtgtctccgagtccattctctgggtttcaacggatgaatgtgtttctcacaaacttgggggctcatctgggatctatgagcctgtgtggagtgggactccagttgagaagggagatgcctcccacctgatttaggtggccctctctgtccagatgtcccggctccccacagaggccatagacaaacctgagactgttattcagaaggcagcagagacgacacagggagaaaagcaggcacagcagcaaccaggcaacctcgttcatgagccaaggtaggaaaattggactctatgtactgtcttagtggttggaggtcaagtgtgtgtaactgagatgtatcytagatacaaagtgagtgcagagttttgttctcctacaagggaaatggccagagatggatgaagcgattctcagagtgtgcaaaaaatctccagtagkgggggttgagtacacaaggaaaagttcagacacagagactgaccaaaaatgggaaacagaaattctaggcctaggggacaaaggaaagagggagtcaaagagaattcctctgacattttcctggatactcctttggggataatgctgcaggtttggagggacaaccctcaaaccagggacaaggaaaagcaaaagatgataaagtattcctgtcttatctggctcaaagtcctcattcataagccttcagtgttttggcccaaatttggctcagatgaggattgggtgtgccaagctttaatcctctatgtgaatgataaaaccccatcctcacaagaggagataggttatgctcttagctggatcaaggaattagtccccacattccctctcaaagaagaagaaaaaaaaactagtaaaaagcccttgcccagtgaaaagccctgggacccccctatcacacttgccccctccatatatctyacaatataggagacagaaagatcaaggggcagcaggtgggttagaggaggaaagacctggagaccatgggggagccaaaccaactcttcctttcaatcctaatccaaatttaagaaaataattagaacagtgtaagaggaatattgagaaattccctattcctttcacacaacaggcatctagcatgtttcctcttagggaagttctcatgggacagggagagaatggctttgtaaatgttcctcttacaagtactgaagttaagaatttcaagaaggaaatgaaaccactcctagaagatcccctcagtttagcagaccagctggaccaattcctaggacctggcttttacaccgagcatgaccagttaatagaggcaataccctcttgggaagaagttttgccagatgaacaaaaattttcaaatgtcgatcccaaatggtataataatgatcccagggaatggacccaaatgcaggacctcagggaactataattaaagggatcaaagagtccacttctagcacaccaaatgtctcaaaagcattcaagattcaacaagaaaaagaggtcactccctctgcatttctacagaggttcagagatcaaatgagaaaatactccagattagatccagaggacctagtaaggcaaagccttctgaaggttaactttgtaactaagagctggcctgacattacaaagaaattaccaaaaaaactgatkaatggaatgagaaaccarttgaggaatcactgagtgaagctgagaaggtctttgtaagaagagaagagaagcagaaacagaaagccaaaatcatagtttccattgtggaagaggtagtcagaaaaaggttagatcaagatccccctcaaagtagataagstgttgacacagagaaagaagggaaactcagggaaaactcctaagactarctggatgttacaattgtgataagccagggcatcttaagagagaatgccctgaatggaagaaagaagaaaaggttatccctctcatgaccattgatgaagactagaagggtcagggattctttctgagtaggtctcaccaggaacccttaatacatttgaagatgggaccatgctcaacacgactacttatcagggaaatgcaagtcaaactacaatgagatatttcttcatgcttgttagtatggctattattaaaaacacaaaatataagtgttacagggatgtggagtaaaggaaacccttgtrtactgttggtgggaatgtaatttggtacagccagtatgggaaacagtatagaggttcttcaaaaagttagaattagaattaccatatcatcaagcaattctacttctggttattatccaaaggaatctaaatcaggatctccaggagatatcttcatgcccatatttttgcaatatkattcacaatagctgcaatatyaaaacaacctaaatgtccatcaatgaatgaataaagaaaaagtagtatcacacacacacacacacacacacacacacacagagaaatagtattcagtctttaaagaacaaagatgaaggtattacactatctgacttcaaactatattataaggctacaataatcaaaacagcatggtactgttttgacacaatcacagacccgtagatcaatggaacagaaaagaaaactcagaaataaagctgcccacttacaaccatcagttctttggcaaggccaacaaaaataagcaatgtggaaagaacttcctattcaataagtgatactgggataactggctagccaaatacagaagattgatttcaccatatacaaaaattactcaaaatggataaaatatttaaatgtaagacctcaaactatgaaaatcctatttaaaaaccctagcgcggtggctcacgcctgcaatcccagcactttgggaggccgaggcgggtggatcatgaggtcaggagatcgagaccatcctggctaacaaggtgaaaccccgtctctactaaaaaaaatacaaaaaattagccaggcgcggtggcgggcgcctgtagtcccagctactcgggaggctgaggcaggagaatggcgtgaacccaggaagcggagcttgcagtgagccgagattgcgccactgcagtccgcagtccggcctgggcgacagagcgagactccgtctcaaaaaaaaataaaaataaaaataaaaataaaaaccctagaaaataccctttctctacatcagacttggccaaaaaattttggcaaagtcttcaaaagcaactgaaataaaaacaaaaattgacragtgagacctaattaaaaatcytcctcacagcaaaagtaactatcaatagagtaaacagacaacttacaggatgggagaaaatattcacaaacaatacatccaacaaaggtctaatatcaacaatctataaggaatttaaacaaatttataagcaaaaaataaacaaccccattaaaaagtgggcaaagaacatgaacagacacttctcaaaagaaaaaaatatgcagcccacaaacatgtgaataaaaatgttcagtatcactaatcatcagagaaatgtaaatcaaaaccacagtgagataccatctcacaccagttagaatggctactattaaaaagtcaaaagacaatagatcctggccaggctgtggagaaaagggaatgtttatagaatgttgggaatgtaaattagttcagccactgtggaaagcactctggagatttcaaacaacataaaacagagctaccatttgaccattacccattactggtatataccaaaaagacacatgcactcatatgttcatcaccatgctattcacaatagcaaagacattaaatccaccttgctgcccatcagtggtgaattggataaagaaaatgtggtacatatacaccatggaatactatgcagccattaaaaataatgaaattatgtcttttttagcaccatggatggagctggaggccataatcctaactgaattaatgctggaatggaaaaccaaatactgcatgttctcacttatwagcgggagataaacactgagcacatatggatataaatgtggaaacaatagactctggagactactaggggacagaaagggaagagggtatgggttgaaagactacctattgggttctatgctyactacttgagtgcaatatagtcatgtaaaaaacctgcacatgtaccccctgtatttaaaataaaagttgaaattttaaaaaaattatatgtgtttgtgtgtatgcatgtgtatatgagtgtatgtatgaattagtccattttcacactgctatcaagaaagtacccaagactgggtaatttataaagtaaagaggtttgactcacagtttctcatggctgtgaggcctcacgaaacttactattatggcagaaaacaaaggggaagggaggcatgtcttacatggcagcaggcaagacagaagagtgcaggggaaaactgccaaacactttttcaaaaccatcagattgcaagagaactcactcactgtattagtccattttcatgctgctaataaagacataccctagacttggcaatttataaaagaaagaggtttaatggagctaaagttccacatggctggggaggcctcacaatcatggcagaaggcaaggaggagcaagtcacatcttacatggatggcagtaggcaaagacagagagcttgtccagggaaactcccatttttaaaaccatcagctctcataagacgtgtttagtatcaggagaacagcatgggaaagacctgcccccatgattcaattacctcccaccaggtccctcacccaacacatgggaattcaagatgatatttgggtggggacacagccaaaccatttcacccactatcacgagaacagcatgggggaagcacgcccataatcccatcacctcccacagggtccttcccttggcacaaggggattacaatttgagatgaaatttgagtgggtacacagagccaaaccacatcagtgtaaatacacacatttagtatgtatgtatgtgtgtgtgtgtgtctacataaaaatcaaacttttcttcacagcaaaagtaagcaaagtaaaaaaattaatattgagatataaataaactaaatatcaactcatataaaggagggtacttaactcaatatcaattttaaaacaaaatactttttcagatggcaacgtatataacasataattcacataaaataaaaaattaattattctgagaaatataaaaagatatccaacctggttcatatgagtaaagggcaaacaaaatatattatttttcacttataaaaataaattttaataaaagtttcctgtctattagaatttagagaaatagtcactagatttggtagaagtagtataaattggtacagcctctggagggtacctgagcaataagtatcaaaagttatcattattawatcctttacacagtttyctctccaaaataccttttaatcctacagatatattcacaataatttacagtaacattgtttatattagtaaaatattgaaawcaatctaaatgtcaccaatgggtgggggaaagagtctgattaaacagagtatgaatgcaactgttcaataaaatataatacaaacaataaaaagagtgaggcttctgtcttcatactgatggagacaaatcacccccaaacatgtgaataatatgtatgaataagacatacattgtcttttgttgctgggggaataaagtatatgaacataatatgttttcgaatgcaaggcaagtcttgtaaatctggaagaataacatgaacttgtaacagtggtgatccccagggaaggaaactgaagatcagaaatcaagggaggggtggggacatggtttatactccatacactttcatatytctgaatttttaccataaaatgatttgttatttatccctcaaactcaaaataagagaagctgagggtaagaaataaaagcaggaagaaagaaaaaagagggaagaaagagaggaagaataaaagggaggaagaaggttaaaaataaattgtcagtagcagggcaattctcaaaaatgaaagcaaaaagtccctgctggcattaaaacaagaattttcttccccctggagagcttaactttgcttcagcagaaaataagtagcaaacattgtttttcccagttacatctgagcccctggaacttcaggttctccagggagcgggtattgatctcttatgccccagctatatactcactgatgaggaggaactgaaaagagagaccttgatcagcaatcagtgccagttgcctaaagagaatgtgtaggcaacctcaacgtaagtaaaacaaagcaaatagcattttgttcaaagtctgccatgtatcatgccagtgcatggtggaaattttggagcaaaaggttactcaaatccccagcatgtttcacctcaaaaccaggaggaattacttcatccctggtagtttgattcaggctgagtattacctgggaaagaatatgaacgaacaaatgattgaatgaatcagtcaatcgactgatcaattaagcaatcaacacaatatgcctttaatgtattatttggtattaaagtcattgctgggcatatcttccattcccagccccgtgttgggaatttacataaatttgctcacttaaacctcacatcactgcacaaaagaccttacttttttgccttcattttttaactttttattaggaaatatagattcacaggaagtttcaaagataatagggagaagtttcatatatccttcactcacttttccctcaatggttcaatcttacataattataatatgacatcaaaacaggattttgatgctgggacaattgtatgtatagctctatgtcatttcaaatgtgcgtagatttgtgtagctacgactgcagtttagatacagacttgtttgatcatagatctcagattctacatgtctcctttgtgctaccccttctggtcttaccacaccccttcactaaccaccccaacctctagcaatcaccaatctgttctgtatttctataatgttgtaattttggtaatatttgtaactggaattatatagtatatgaccttttgatgttgaatttttacactcacaataatgccctagagattcatccaagtttctgcatatatcaacagtttatttctcttttattttgagtaatattccatagtatggatgtaccacaatatgttaaaccattcacttatcatagggcatttgatcatttacagtttttggctactaccaatataaatattataaaaaattttgtacagcattttgtgtgaatataagttttatgcaaatataattgcccgcaagtccaaggactgggttgtatagtaagtgtatgtctagctatctacacaactgccagactattttccagaatgaccaccattttcaccagcagtgtatgagagatctagttactgtgtctttgccagcatttgctattgtcattgctttttcattttagccattctgcagtgacatctcacttgtagtgtagtgataactcattttgtttttactttgcatttccctaatgactaatgatgttggacatcttttcatctgcttatttaccatccatatagcactttttggtaaaatgtctgttcatgtcattccttcattttctaatgtgattttttatttttagtttgagagttctttatattctctaaatgtatgtcctttatcagatacggcattttaaaatattttattttagtctgtagtgtgctttttcgtcctctttaacaaagcgaaagcttaattttaatgagattcaattactgaggttttttttggggggagggggattgttcttttggtgtcatgtctaagaacccttcacaagacctatcctaaaaattttgccctgaagattttgtcttagattgctctctaagagttttaaggttttatatttcacatttaaagctgtgattcattttgagttaatttttatataaggtatgaggtttaggttggggttcatttttttgcctatgaatatccaattgtctcagcactacttattgaaaaaaggcttcctccattgaattgtttctgaacctgctcaaaaatcaaatggctgcactcacatggatctatttgtcaattcactattttgttccatctttgtatctttccaccaataccacagtgttaattactgttgatatataaaaactctcaatgttagataaagtgattcatctcattttttcttcttttttagaattgtatcagctattctaatttctttgctcttccctataaatttagattattcttttcacatactgaaaatactgtgctcagatattcattgcactggtgttaaacctgtacatcaatttggggagaacagacaccactgtattgagtcttataattcccaaaagcaacatatctttatttagatcttctttgatttcttccatcagcatattgtaattttcatcatcaagtactatactggtttgttagatttatacttgagtatttcatttttgaactattatcagtggtactgtgtttattccagttcccacacgtttactgctaatatggaaatactattgcttttttataactatcttgtattctgtaacttttctgaactcacttattacttcttgaagtttttggtatattcttggaatcttctacatataccatcatgtcatctacaaatgacagttttattccgcctttctgatctgtatgacttttaagcctattcttccttcactgactagaatttccccaactatgttgcatagcactggggagagtgagaattctctcccatctgttcccaattttaggggcaagcattcagttggtaactattaagtaggatgttagctataggtttttctgtagatattcttcatcaagttgaggaagttgccctattttsctagtgttctgagatttttaaaattatgagtagatgttgaatttcatcaaattccttatgtttatctatttatatgatcctgtgatttttctcctttagacctgtaatataccccacttggtcactgtgtataattttttacatatcactgaattctatttgctaatattttgttaaagatttttgcatctatattcattaaaaatattgggctatggtcttctttttttgtgtgtgccattttgcctgcttttgctaatagggtaatactgggttcatagaataagttaagaagtgttctttccacatctgttttctgaaagaaattgtatagaattgaagttcttttttaaacatttagtgaattatgctgtgatattgttaaaaggaagtttttacgtcataaattcaattttcatggctgtagggctattcaaattatcaatttcatatgggttagcttatacttttcaattaatttatttatgtcatttcagttgtcaaattaatatgtgtatagatgtttgtagtattctcttattctctttttgtgtctgcagagtctgtagtgatatccctgtttttctgggcttagtaatttgcatcttttctctcttatcttggacaaaccttctggaggtttgtcagttttattgtcttaaaaacgagcctctctctcacagttttctttccattgtttttctgtatccaattcattgaattctgatcttagccttattatcctccttcttctgcttcctttggatttgttttcttcttgttttctactttacttttcttctttttcaacatttttgaagtaaaggcttagattattgattttagcctttttctttttttaacgtaagcatctagtactctatgatgcccactaaacattgatttaactgtaccccataaattttaagtaccgtatttttattaagttcaatttttgtatttcccttgtgactgcctctttgacccaaggattgtttataaatatgttattttgtttccaagtgcctggagagtttcctgctacattctgtgatttttgtctccttcaatttctttgtggtcaggaacacacagtgtgaattgcattcttctaaaattatatagattatgtacaatccgtcttgatatatattctgcaagtgctggaaaaaacatgtattctactcatgtgaggtggactgttctataactattaatggcatcctgttggttgatggtgagtgttgggttcctctatatccttgctgattttctgtctagttgttctataaattgctgagaaataaatattaaattcttcaactataattgtatatttgcctttacctcaattcagtttattattttttcctttatatatgttgtagcccactcgtttggtgcctacacatttaggattgctatttctttttttgtttgtttttttatactttaagttttagggtacatgtgcacattgtgcaggttagttacatatgtatacatgtgccatgctggtgcgctgcacccactaaatcatcacctagcattaggtatatctcccaatttcttttctttttttttttagagacggagcctctctctgtcacccaggctggagtgcagtggcgcgatctcggctcactgcaagctccgcctcctgggttcacgccattctcccacctcagcctcccgagtagctgggactagaggcgcccgacaccatggccggctaatttttgcatttttttagtagagacgggatttcactatgttagccaggatgatctcgatctcatgacctcgtgatccgcccgcctcggcctcccaaagtgctgggattacaggcgtgagccaccgcgcccagcctaggattgctatttctttgtgatggattaacatttttattaagtaatgtccgtctttgtccttggaaatttttttgctgtgaaatatactttgtctaatatttatatagccatactttcattcttttaattcttgtttgcatgatatatcctttccttctttttaattctaagctactatatctgaggtgagtttttctgtacacagaatacaattgtgtcatttttgtttccactctgccatattctttcttttatttgttattaaatgaaagagacatgaaacatcagaaggtaagaaaaattaaagagtaaatacaacaaacttttcttttgagttttaaaaattatgtttgagaattgaagcaaaaattataacactacctaatgtggtactcagtgtatgtgaaagaattgtttaagacaattataagtgagagaaggtaaagaagttaaaaaggaagtaaggtttccccacttcactcaaactgataaaatggacagttatgattttacaggcatacctcagagatattatgggttcagttccagaccacctcatttaggtgactatcacaataaagcaagtcacacaatttttttgctttcccagtgcatataaaagtttacactatactgtagtctattaaatgtgcaatagcattatgtctttaaaaagtatatggcttaattaaaaaatactttattgctaaaaatgctgacacaacaacactaaatgggcacatgctgctagaaaatggtgctaatagacctgcttaatgtaggattgccacagacctttaatctatttaaaaaatacaatatatgtaaagcaaaataaaacaaggtatgcccatataatgcaacacctagagaagccactaaaaatgctataaaaagatatctaataaaaacactatacaaaaaaaaagactatagatgcaccaaaatgggattataagaaaaagttcaagtgacccacagaaatgcaggaaaaagaaaagagagaaacaagaaagaaaaagaacagttcattttaaaaatggcatacaactgtagcatatcaatgaccacataaaatgtacattgttttcttcatttttagaacaataatggccataaattcccattgtaaaagtgaaagtagaagttcagaagtttataagtttggaaaataatgttctttttcacctaatcccacatccatgaataactgtacttgaatttgctgtgcacactttctggcaattatccatgagtaaataatgacagtggaagcaagagacagtaggagtgagagagagtttggtttttcagagaatccacaagctacttattttttggtggcgggcttggggggattctttattttcctttgaacttttattttaagttcaggggtacatgttcacaatgtgcaggtttgtcagacagttacatgtgtgccatggtggtttcctacgcaaat

SEQ ID NO: 96111 - DNA, 55913 bp, Homo sapiens
  misc_feature (1)...(55913): n = A,T,C or G
cgtccaggctggagtacagtggcacatcttgactcactgctcatttgccaccatggccggctaatttttttgtatttttagtagagacagggtttcaccattttggtcaggctagtcccgaacttctgacctcaggtgatccacctgcctcggcctcccaaatcactgggattacaggcatgagccaccacatctggcccaatatagagtttttttatttttattttttttattttttgttttgttttgtttttgagagagtgtcactctgttgcccaggctggagtgcagtggtgcgatctcagctcactgcaacctccacctcccgggttcaagcaattctcctgcctctgcctcctgagtagctgagattacaggcatgcaccaccatgtccagctaatttttttgtatttttagtagagatggagtttcaccatgttggtcaagctggtctcgaactcctgacctcagatgatctgcctgcctcggcctcccagtgctgggataacaggcatgagccacagcgcccagcccaggaaattactattggaagctgaagaaaacaaggcccagttatgtaacccaagtgagatatactggaacgcttgttttaatcacctctcttgacttcatcagtgcaggagggattcctgacctaggattatggcaatggctgaacacaggacacccgaatctggacagaagagatccagagcagtttatgagtcacatgtactcacagctcaggagaggaggacacactctgcaggaccacacagggcttgtgcctggtaccagtggaccacaagaggctttgtagtatcaagagggtaagggtggccgggcgtggtggctcatgcctgtaatacgagcactttgggaggctgaggtgagtggatcatttgaggtcaggagttcaagactagcctggccaaacatggtgaaaccccatttctggccgggcgtggtggctcacacctgtaatcccagcactttgggaggctgagccgggtggatcacgaggtcaggagatcgagaccatcctggctaacacggtgaaaccccgtctctactaaatatacaaaaaattagccgggcgtggtggcgggcaccggtattcccagctacttgggaggctgaggcaggagaatggcgtgaacccagtaggcggagattgcagtgagcggagatcgcgccactgcattccggcctgggcgacagagtgagactctgtctcaaaaaaaaaaaaaaaaagaaacctaatttctactaaaatataaaaattagccgggcatggtggtgagtgcctgtaatcccagttacttgagaggctgaggcaggagaatcacttgaaacctggaaatggaggttgcagtgagccgagatcgtgccactgcactccagcctgggtgacacagcgagactcatctcaaaaaaaaaaaaaaaagttgaggtgtcctctggtttcgtggtgtatgtgattggcttgtttttataattccatgggctggcagggaactgaaaccagctactcagggggaagcaggaattgtacccggtccacctgataaggaggattgcttggcacttggctagagtacgttatgttgaaatgttgaaaatgccagctattttctttctttttttttttgagatgaagtctcactcttgtcccccaggctagagtgcgatggcgcgatcttggctcattgcaacttctgcctcctgggttcaagcgattctcctgcctcagcctcctgagtagctaggattacaggcatctgccaccaccggctaatttttgtatctttagtaaagacggggtttcaccattttggccaggctggtcttgaactcctgacctcagcctcccaaagtgctgggattacaggcgtaagccaccgcgcccggccaaccagctattttcttttagctgcttatgataaaattcaagattataatgagtgaaaaaggaaggattcaggtctcaggtagaattacgagggcatataaaggagccaggatttgctggtttcaaacatataaactatcatgtaatttctttctttctctttctttctttttctttctttctttccttctttctttctttctttccttccttttttccttctttccttctttccttcttccttttttttttttctgagataggttccagctctatcacccaggctggagtgcagtggcacaatcttggctcagtgcaacctctgcctccccggctcaagccatcctcccacctcagcctcctgagtagctgggactacaggcgcaaactaccatgcccggccaatttttgtatttttggtagagatggggtttcgccctgttgcccaggctggtatccagctcctgggttcaagcgatcctcccacctcagcctcccaaagtgctaggattacgggcgtgagtcactgcaccccacctaatttcagtttttgtttgtttgttcctttttttttttttttttttgagaccgagtctcgctctgtcgcccaggctagagtgcagtggcgcgatctctgctcactgcatcctctgcctcccgggttcaagcaattctcctgcctcagcctcccaagcagctgagacaacaggtgtgcaccaccatgcctggctaatttttgtatttttagtagagatggggtttcaccatgttggctagactggtctcgaactcctgacctcaagtgatccacctgcctcagtctcccaaagtgctgggattacaggcgtgagccactctgcctggccctaatttcattttttaagcaatgaggttagtttcttttattataaacttagcctcgcagtaaaagattttaaaaaatatcttggcagtttttgcgcctaggacagaaactggcatggtgcttatccacactgacatctgaataaatgcggtctgagacctgttcttcttctatttctcaagttgctgcctgcaaacggacaagaatctgttacctcgaagagagcaagagcagagcatgtgactccagcaaaaagtagggcatctggggagctgagatgactgaaagccaccaggaaggtactttccaggcagttaaattttttcttctggtatccccactctcctccatcagccacagattgctccctagaagaggtgatctgtgatgccaagtcagtgatgctcagggctgggtactatgatcttcctccaggtgtcaaggaacttgcaggaaatcgtcaggccaattcgggctgccacgacgaagcaagtgaggctcataaaagtagtcacccagccaagatttgaactgtggtctctctgaggataaactcatgctctgtcaactacatcagggggtttcaagctttctcccaaaggccttgccctgtgaataccaggaaacccataaaagtcccagatctcagatgaggatagaaatacatgccatcatttgcatgttacaatgcaaaacctgtggtactcacctgcttcagcaagcaggatggtgtgtggatgccctcagaccactccagtctgacctgggtacgtcggagcagctgtgctggacctccaccctacaggcacttttgcagtgtcattcattcaaccattatttattgagggccaccatgctccgggccctggcatggtggactgtacgcagggaggcagcctgggcacagggaggcagcctgtgtacagggaggcagcctgggtagagggaggcagccagtgaggccagactgcctgcatctgcagcacgttcacctgtgtgatgctgagtgtgtgaattactggtctgttttctcttctgtgggatggcagtaacataggctttctcctcccagggtggccaggagaaatggatgagttaaggcatgtacacagtgccagtcatatagcaagcagtctcatttcttttttctttttcttttttttttgagacagggtctggctctgtcacccagactggagtgcagaggtgcgatcttggctcactgcaacctccgcctcccaggctcaagccattctcccacctcagcttcccacgtagctgggactacaggcatacaccaccgtgcccggttagtttttgtatttttttgtagagatggggttttaccatgttacccaggctggtcttgagctcctgggctcaagggatccacctgcctcagcctcccaaagtgctgggattacaggcgtgagccactgccccagcctctcatttctttattactattatttgataactgatggatggatttaattacaaaattgtaagatacacaggaaaggccatggttaagcccattttacagatgagaacaattgaggcttgggccattgaaaaaggttgctgggaatagagtaggtagaattattcccactttatagacaagtagactgaagctcagggagttaagtcaccagctcaaggtcagtatcagtgtcagagcccaggcccaggcccctccggcctcagtaacagccccctctttgaactctgaactaatggggcagtgtttcacagaaggcacaggtggcctcagtgacgggaaaggcccaggaggacaggtggcctgagatggctgaggtcctgcagcagcgtgtactcctccagctgaatcggcctgggcctcacctccttggtcctcacctgctcagactctgcaggaagctccctgggaaacggttcaacccagagtttgtgctcagaaaacccatcttcccaccgccactgggctcagcacctaggcctggctccatggctgacagcgatttatttatttatttacttattcatttgagacagagtctcgctctgtcagccaggctggagtgcagtggcacaatctcagctcactgcaacctccgcctcctgagctcaagcgattctcctgcctcttcctcctgaaagctgggattacaagcatgtgccaccaagcccagctaatttttgtatttttagtagagatggggtttcaccatgttggccaggctggtctcgaactcctgacctcaggtaatccgcccaccttggcctcccagagtgctgggattacaggcatgagccactgcgcctggcattaatagggatttaaacgcgtagacccccaacaccccttcctcacccagcagctcccagagcagcccctagctcctggctggattagaggcacctggcactgtgcctgaaatcaacacctcctttgggttttgggttctcattagccagaactttctcatgaaataaaaatgataccctgagggaaaactgttaaaagtttgtaattatagaaggggaggagctcctgtctttctgttttgttttgttttgttttgttttttgagacggagtctcagagtctcgctctgtcacctggctgaagtgcagtggcatgatctctgtcgactgcaacctccgccttcagggttcaagcgattctcctgcctcagcctcccaagtagctgggactacaggcatgcgycaccacgcccagttaatttttgtagttttagtagagccagggtttcaccatgttggccaggatggtctcgatctcttgacctcgtgatctgcctgccccagcctcccaaagtgctgggattacaggcgtgagccaccgagcccggccaaaaggacgcagactctgttttgaaggaggaggtggaaagggatggaagaaacttccagagcgtgccgttttctttgtgacaggctctgtcctcggcaggggcaggcgtgacctctctgagcccatgagcgggaactgtttttgccctggacaccctgggatgggccctgccatgttgcccaggctggacttgaactcctgagcatcccctgccccgctgccctctcggcctccattcgggagcttcacatccccctcccctcacccccacgagtcctggggggccagctgggagctctgcggggagtaaccccacgagggcaaggcaggggagggcgccgcccagcgccccgtggggcttccgccgcctcgaggcagacccggatccagagggcgcctggacaaggtagggcccscatcccgccccggctccgcgtgccctcacaagaatcacccgtctccgaccgtcacctcctcccgctcccgggcctccccggcagcccccacgaccgtccaccccggcccgcccggcccgggctcccgctctctcggccgctctccgcggagccccgcagcccaaggggcagcaccyatcccgggacagcggcctctcttccccaccgaggcgtctgcagggctccccgtagcggcgcggggctcggggacacggactcgaaggaacctgaacacctccagagcgtggaggttgtgggggatgagccccaagaggcgcacccctcccaggctgccgggacccaaggtgggcacgggctgggtccgaggaaggggtagaggaggcaggatttggggctcggctggagcagagcagcggcagaacccccagccgaagccggtgggagtggagatttcggatggagccggctggacccgcgccccgggcgccgggcgccgggagccttttcctggctcgggcgcgccccctggaggccggaacctgacatcaagcgcacccaaattgctgggactacagacctggcgacagtacccagcccatcctactcaactgcaaatgcccccttttacacttaggtctatttctggacgctcaaagatccattgagatctattctgcattggttggacagaaccagttttcttcatctacaaataataatacaactctccttttttttttttttttttttttttttttttgagacagagtctggctctgtcgcccagggtggagtgcagtggcgtgatctccgctcactgcagcctccgcctcccgggttcaagcratctgggattacaggcatgcgccaccactccaggctaatttttgcatttttagtagagacagggatttcaccatgttggccaggctggtctcggactcctgacctcaggtgatcctcccccctcggcctcccaaagtgctgggattacaggggtgagccaccacacccagccaagttaattcaatttttaaaaataaataatttttttttgaaacggagcttcactcttgttgcccaggctggagtgcaatggcgcgatctctgctcactacaacctctgcctcccgggttcaagcaattcacctgcctcagcctcctgagtagctgggattacaggcgtgcaccaccacatccagctaattttgtatttttagtagagatggggtttcactatgttggtcaggctggtctcgaactcctgacctcaggggatacacccgcctcggcctcccaaagtgctgggattacaggcgtgtaccaccccacccagccaaaaaaataaaattaaaaatatgtatataaataataatatatattattaaatataataaatatatatagaaataaataggccgggcgcggtggctcatgcctgtaatcccagcactttgggatgccaaggcgggtggatcacatgaggtcaggagttcaagaccagcctggccaacatgatgaaacccccgtctctactaaaaatacaaaaattagctgaccatggtggcgggcacctgtaatcccagctactcgggaggcaaggcaggtgaatcacttgaacccaagaggcagaggttgcagtgagccaaaatcatgccattgcactccagactgggcgacaagagcaagactccgtcttaaaaaagaaaaaaagaaaagaaaagaaaagaaaaagaaagaaataatggacggggttgggagagcttctggacagctgaacacttgctggtgcctggagggtagtgtgcctggagagggcatggaggtgccacacacttccccttcccttgccctatggatctcttccatctggttgttcttctgtatccttctgaatatcctttattttattttattttakttttttgagatggggtctcagtctgtcacccaggctggagtgcagtggcaggatcttggatcactgcaacctccacctcccaggctcaagtggtcctcccgtctcagcctctcaagtagctgggactacaggtacacaccactatgcccagctaattttttgtattttcagtagagatggagctttgtcatgttgcccaggctggacttgaactcctgagctcaagcaatccacctgcctcagcctcccagagtgctgggattacaggcgtgagccatcacacccggcccctgaatatcctttatgataaacctgtaaatgttagtgtttctctgagttctgtgagccatgctaccaaattaatcaaacgtaagtggcgggtcttgggaactccaacttacagctggacagtcagaagtgttaccagcacactgggttcttgtaatcttccaggatagaaatcaagagagatcaccagacatagcagcaaaaagaaagtttattttagcttgtgcacaaggaagccagcactgagaaaggaaaaggaacgggctgctccccaggggtgttgtgtgggttagttttatagcagtggtccccagcctttgtggcaccagggaccagttttgcagaagacaacgtttccacggatggggggctgagggggtggtttcaggatgattcaagcacatgacatttatttgcactttatttccatyattattacattgtaatatataatgaaataattatacaactcaccatcatgtagaatcagtgggagccctgagcttgttttcctgcaactagacggtcccatttgggggtgatgggagacagtgacagatcatcaggcattagattctcataaagagtatggaacctagatccctcacatgcaccgttcacaatagggttcacgataggattctcctatgagaatctaatgctgctgctgatccgacagaaggcgagctcaggcagtaatgcaagcgatgcggatcggctgtaaatacagatgaagctctgcttactcgccccccactcacctcttgatgtgtggtccagttcctaaaggccgtaaactggtatcagtccatggcctggggtttggggacccctgtttcatagggttgtgaaaggagaatagggccaggcacggtggctcacgcctgtaatcccaacactttgggaggccaagatgggaggatcacctgaggtcaggagttctagaccagcctggccaacatggtgaaaccctgtctctacaaaaaatacaaaaattagccaggcatggtggcacacgcctatagtttcagctatgggggaggctgaggcaggagaatcacttgaacctgggaggcggaggttgcagtgagccaagattgcgccactgcactccagcctgggttataagagtgaaactccatctcaaaagaaaaaagaaaaaaaaaacaaaaaccaacaccaagcacagtgagatgcttcacacccacgagatggctataatcaaaagtcagataataagtgttggtgaggatgcggagaaatttgaaccctcctgtgttgctggtggggatgtaaaatggtgtagccactttggaaaacattttggtagttcctcaataaggtagacatacaatatatagaacccagcaattccacttctaagtatatatgccccaaagaaatgaaaacatatgtcagcacaaaaggtacacagatgtttacagtagcatgattcataatagccagaaagtgaaaacaacttaaatacccataaacaaataaataaagtatatatccacaccatggcaccctgtcacccaggctggagtgcagtggtgtgatcctggctcactgcaacctctgcctcccaggctcaagccatcctcccacctcagcctccctagtagctgggactacaggcatgtgtcatcacaactgggtaattttttttttttttttttttttgagacagagtctcgctctgtcgcccaggctggagtgcagtggtacaatctcggctcactgcaacctccacctcccgggttcacgccattttcctgcctcagcctcctgagtagctgggactacaggcacccgccaccatccccagctaattttttgtgtttttagtagagacggggtttcaccgtgttagccaggatggtctcaatctcctgaccttgtgatccgcccacctcggcctcccaaagtgctgggattacaggcatgagccaccgcgcccagcaatttttgtgtcttttgtagagatgagttttcgccctgttgcccaggctggtcctgggttcagctgggcacagtggctcacgcctgtaatcccagcactttgggaggccgaggtgggtggatcacggggtcaggagttcaagaccagcctggccaacatggtgaaaccctgtcctactacaaatacaaaaattaaccgagtgtggttttgccagcctgtaatcccagctacttgggagtccgaggcaggagaatcgcttgaatctgggagacagaggttgtagtgagctgagatcgcgccactacactccagagtgggcgaacaagtgagactctgtctcaataaataaataaataaataaaaataaaaataaaggcatttccgtcttgaagacccttcttagccaggctggcaggaaacatgacttcagttctagaggctcaggagtttcaaggggaaggacaaggtgggactggttcttggtcactggtcctcccaagtttctgcagggctgcccatcttcacaaatcagcttgggacagctcacattgagcagctccccactgtcctcccatccccctggatcctaatagcccatatataccgggaagacccctgctgtctttcagcattaccccacccaggaaacaagtgcagcaaaaatctttcccttgttgcacaataacccatmgaggtgggaagtggagcttgaaacagtgtgactacgtcaggcccagggaacaggggggcagaggggggcagttccccagagagggcatctttctctaattgcagaaaggtatgctacaggccagtaggaaaccattcatctctggtttcccagtctagccctggcacgctgttgaccctcagttaatgatacctcgtgtgtgtgtgtgtgtgtgtgtgtgtgtgtgtgtgtgtgtgtgtgtggttttatttatttgagtcataactacatctcccacgtggcatggttgggaaggcccctggactccaggatctatagacctcccttagcctccccctaattgccccagtcctggtgagacggtctttttgaaaattgtaacagtgaaggccgggtgtggtggctcatgcctgtaatcccagcattttgggaggctgaggtgggtggatcacctgaggacaggagttcgagaccagcctggccaacatggtgaaacccggttgctactaaaaatagaaaaatcttggccgggcgcggtggctcacgcttgtaatcccagcactttgggaggccgaggcgggtggatcacaaggtcaagagatcgagaccatcctggctaacatggtgaaaccccgtctctactaaaaaatacaaaaattagctgggcgtggtggcgggcgcctgtagtcccagctactagggaggctgaggcaggataatcgcttgaacctgggaggcggaggttgcagtgagccgagatcgcgccactgctctccagcctgggcaacagagcgaaactccatctcaaaaaaaaaaaaaaaagaaaagaaaaaaagaaactttatgaatttgtgttgggctatatccaaagccgttctgggccacctgcgacctgcaggccaaggtttggacaagcttggtttaaatgatcgtagcctttccccagaactgaaccacctttgtaaagcagacgaaagacccaccaggttaagaggatgaggagcctgaattttgctaacgtgtagacataaatcattaccagccatcattccagaggccacaagatttgcaactcccccagttatttctgcagataacatccctactgcagaacctaagacttggcctttcaagatgtcttctcaggcttttgcgtttcttgtgaccgatgactccgcccagaccctgacacccacagactagttccatggccacactcagaagttgactccctgaccaggcaatccttgaaaaaccctcgcctctgaattttcagagagattgttttgagtcgtaactatacctcccacgtggcgtggttggtttgggatgggttcaagcaattctcctgcctcagcctcccgagtagccaggattacaggcatccaccactatgcccagctattttttttgtatttttagtagagacagggtttcaccatattggccaggctggtctcgaactcctgaccttgtgatcacccgcctcagcttcccaaagtgctgagattacaggcatgtgccaccgtgcctggcctaaactctctctttattgcaatgccctactctcagtgaattggttttgcctgttcagtgggcaccaagaatccactgaggggttatctggtcagaggtgggagcccttcttcctccacatgttctcaaggagctctgccmaggccagggaactttctctggctcactcctggcaggctgcagctttctgccccaccacgccatttccctggggcagcaaacacagggaaagggaagcggaaaatacaggagaaaacagagagaacatcatgatcctatctctccacacaggcaaagcacctggcacctgtcagaagctccgtgtagctcatcacagggcgccgcccttcctccatcgtttgcataaaatcacaacagcgtgttaggtcctcagagctcagatgtcacctcccttgatttcacatcagtgaagagcctggtgttcctccccaccgttttcagcttggtgtctgtctctggggactgagcctcattcatctctggtttcccagtctagccctgggcacactgttgaccctcagttaatgatacctcgtgtgtgtgtgtgtgtgtgtgtgtgtgtgtgtgtgtgtgktktkrtttatttatttatttatttatgagacagagtcttgttcagtctcccaggctggagtgtagtggtgctttcagctcactgcaacctttgcctcccaggttcaagccattctcctgcctcagcctccggagtagctgggactacagatgcacgccaccatgctcagctaatttttagtagagacagggtttcagcatgtttaccaggctggtcttgaactcctgacctcaggtgatccacccacctcggcctcccaaagtgctgggattactgccaccacacccgtccctgtttttgttttgttttttgttgtgttttgttttgttttgtttgagacagggtcttgctctgtcgtccaggatggagtgcagtggcttgatctcagctcactgcaacctccacctcccaggttcaagcgattctcctacctcagcctcccgagtagctgggattacaggcatgcaccaccatgcctggctaattttttgtatttttagtagagactgagtttctccatgttggtcaggctggtctcgaactccggacctcaggtgatccacccgcctcggcctcccaaagtgctggcattacaggcctgagccactgcgcccagccgtgcccggtgtttttattcactcaatctggcaacttagttcctgcacctctgacagggacttaggggactgcctgagtaatatagctccaacccaggcccaaaactctgcccttgcatctgcctaggagcctccttcccaaactcctcctcttagccatagaagggctggagctcagagattcctgagggagttgctccactaccctcctgattctctgctctctctgggcctcattttcctcctctagaaaatgactgtttctctgccccgtctrcctcccagcctttcccaaggatcaaactcctcagcaggatgggtcagagatcctcagctaacatgcccaaagtaaaaggggtttgtagggagtttctgaatcacagcaggactttgagggaataggacaagggtctttctttttttttttttcttcccgaagcagtttgtaaaccagttaaaccactcaaygataactgactcaggccaggatcctggctagatgcagaaaccattatatgaagtttaytggggatcaggrcattcacagggtatcaaagcaaaaggttatcttacatcggggaggcctggcaggcgccaccaacaatgggacaagctgacatcacatacctgtacctcccgatcccatcggtctccagattaaaggagactaaagagactttccaagtaaatgcaatgcttgacctgggattagagcctgagtcagaaaaaaaaagaatagctagaaaggactttatggggtaattgggaatatggacagataatagcatcgggtcaatgttaagtttcctgaatttgataatcacacaatgtaggagagcgaccctgttcttgggagaagtatggggaagtgtttaggggtgaagggtcaagtgtctgcaactaattgtcacatggttcaccaaaaccaaatagagagatagggagatagagagaaaagcagggagaaagagaaagagctgaaatgataaccactggtgaatgtgattgttgtatttatactattcttgcaacttctctgtacgttaaatatttttcccgaacaaaagtctgagggagaataaatataaaatatcagaagcagaaggagctttaaagacctcgaggtctgcccaccctctctcagacaagtgccctgagaaggaaaggtcttggcctgcggtcactccatgagccgtagcagagctggccagacccaaccttgctagctgcaaacacgagtccccagcccagggtctgagagctcccaagaacagcaggcgagcctctagtcaatgtccttcctgtttcgtctccctgctccccggggctgcctcacagtcagcaccttgcaggaggtgagcagcccccatgagcttcaggggagaaacctacccctccctttccaaagaaactggacccccaacttccctcaacctgctctgctgaccacactggggagacatccctacctccctgggtgcaggcaggattagacctcagggtaaaaaggagggctcagagcaaaaacgatatgttattttattttatttttttattttattttttgagacagagtctcgccccgttgcccaggctggagtgcagtggtgcaatctcggctcacggcaacctccaactctcgggttcaagcaattctcctgcctcagcctcctgagaagctgggactacaggcgccctccaccatgcctggctaatttttgtatttttagtagagacggggtttcaccatgttggaccaggctggtctcgaactcctcaggtgatctgcctgccttggcctcccaaagtgctgggattacaggtgtgagccaccaagcttggcagaaaaaaggacattttaacagtgtcccctggaaagcagcaagttctggggcctcacttggctgttgcaagcagatccaaaccccagaaaggaaatgtgttgggagctgaggcccagatcaataaatgggcaaaataaacacccttggcacagtcctgtgccagggttgggggcagccagaggacaggattgctggaactggggaccaagccagctggagggtatggacaatgaggggtctccagtgaccccatctttttttttttttgagagagagagagaaatatgcaactggacaatttgttagcttttcttttcttttttttttttttttgagatggagtctctctcagtggcccaggctggaatgcagtggtgtaatctcagctcactgcaacctccgccttccgggttcacgccattctcctgcctcagcctcccgagtagctgggactacaggcatccaccactatgcccggctaattttttttgtatttttagtagagacggggtttcaccgtgttagccaggatggtcttgatctcctgaactcatgatccacccgcctcggcctcccaaagtgctgggattacaggcgtgagccaccgtgcccggctagcttttcttttccttttttttttttttgagtctcaaactcctgacctcaggtgatccattcacctcagcctctcaaagtgctgggattacaggcgtgagccactgcgcctggcctgtgtgtttttcttttcctctttttgttagtttttcaattaaaaaaagacacctaacccatgtagtgtcatctttctacaaccagtgttcccatgggggtaaaactattcagattacttgcacgtaaaaaataatttaacctttagcatgaaaatatgtggcaaaacccagaaagatccatcatgaatccaagatactttcagcaaaaagttataccaaaataaataaaataaaattgaaataatgcttagctgatcccaagtcaagatttacgtttgtattctatggcagtaggtccctccctccacactgcccccagagttccctctttaaaaccagtaggtgagctgggcaccgtggctcacgcctgtaatcctagcactttgggaagcagaggcgagtggatcatgaggtcatgaaatcgagaccattctggccaacatggtgaaaccccgtctctactaaaaatacaaaaactagttggacatgctgggcgtggtggctcacgcctataatcccagcactttgggaggccgaggcaggcagatcacctgaggtcaggagttcgagaacagcctgaccaacatggagaaaccctgtctctcctaaaaatacaaaattagytgggtgtggtggcgcatgcctgtaatcctcgctactcgggaggctaaggtaggagaatcacttgaacctgagaggcggaggttgcggcgagccgagatcgcaccattgcactccagcctgggcaacaagaacgaaactccgyctcaaaaaatataataataataataataattagctgggcatggtggcacgcacctgtagtcccagccactagggaagctgaggcaggagaatcgcttgaaccccggaggttgcagtgagccgcgattgcagtgagcctggcaacagagcaagactccgtctcaaaaaagaaaaaccaaccaaccaaccaaacaaacaaaaaaaacagtaggtcaggtgggtgggtaggcagacgggcatggtggctyatgcctgtaatcccagtgctccgggaggctgtggtgggaggatggcttgagctgcagtgagctgtgactgcatcactacactccagcctgggcatcagagcgagatctcttctctgggtaaataaacccagtgagtcactccctcagctacctagatcctgcagggctccccattctccttgacattccarttctttccacccggggctccacattgcctccccaacgtcacatcacaccccagctcggctgtatcagcccctctaaccttgcccatcaggcctctgttcacctgtctccacctccaggccctgccagcaaggcgcttctccctttctctgcctggtctgtgccacgttgcctgaacacacagcccaccccatcccctcagagcaccaggagctcacatctgggtccaagaccctaccaggagagcaaggcaagagaatgacgctaaggcccagcatgagcctacacagagaaggtgcccactgtctgtcaaattcatccattcaacaagtatttaggctgctcatcgtggctcacgcttataatcccagcactttgggaggccaaggtgggaggatggcttgaacccaggagttccggaccagcctgggcaacatagtgaaacccgtctctacaaaaaaatgcaaaaatggccgggcgcggtagttcccacctgtaatcccggcactttgggaagccgaggcaggtggatcacctgaggtcggaagttcgagaccagcctcaccaacatgttgaaacgccgtctctactaaaaatacaaaattaggccgggcgcggtggctcacgcctgtaatcccagcactttgggaggccgaggcgggcggatcacgaggtcaggagatcgagaccatcctcgctaacacggtgaaaccccgtccctactgaaaatacaaaaaattagccgggcgcggtggggtgcctgtagtgcyagctactcgggaggctgagaatggcgtgaaccctggaggcggagcttgcattgagccgaaatggcgccactgcattccagcctgggggacagggcgagactctgtctcaaaaaaaaaaaaaaaaaaaaaaaaaaaargattagctggttagccagatgtggtggcacatgcctgtaatttcgggaggctgaggcaggaggatctgttgaaccctggaggcggagtttgcggtgagccgagatcgcgtcaatgcataccagcctgggcaacaagagcgaaactgcgtctcaaaaaaaaaaacaattagccggacgtggtggcatgtgcccagctactcaggaggttgaggcaggaggaacacttgagcctgggaggttgaggctaaagtgagctgtgatcaggctcctgcattccagtctgggcaagagtgagaccctgctttaccaaaaaaaaaaaaaaaaaaaaaggtatttattgagcacctactatatgctaggctctgtgtggctaggctctggggatgtacgggacttcaaaccagatagggccttgccctccgggagcgcacagtccactgggatggggtgggagtgggggaaacacgcaggaggccttcagctaagtgggacaaagatcactccacagtgggacaatggcgtggggagcggaggcgccgccggcgaggaggctccgggcgggccgtgctgagaccgcagcatttaacccggcccgaggcagctgggaacagtgctgcccagggaactacaaattcaaaggcccggggaagggccgcgctgagcagctgcaggmacaggcccaggycaggccaggcaggaccggcccctgcagtctcggaggccgggggaagattccscctcttattctcgctcccatccggggggcgccatcttgcttcctttatgrcggcgaacgaggcccagagakgccaccgtcccgcgcggggcagcacagcggcgggrgagctcggagcgcagagggccgcatccccagttcccagtctccatccccggcagaagcaggcggagcgacccggtccccgcccccgcgcccgccccgccccgcgcgcccgcctggcccctcggccccgcccctgctccggagtgacgcgggcccgggcgcgacggtctcggcggcggcggcggcggcgacagagcgagcgcggcgcggggccaccatgggggcccagctcagcacggtaggcggggagggggcgccggggccgcggggcgtcgcgagggactgggacccggcggcgagggggcgggctggcctgcgggaggtgacgcgggacccgggccgcacccggccgcacccacttcgcccgcccagcccgccgcgccccaccccaccccacaagggcctgggcgagctacgtggtgaccgctacttacgccctggcagtctgcagcggggacccagccctcctgcccggggggcgcgccagagcccagcacccgggggcacctgggccctgccctggccgccgtggggccttggctgctggagggacccgtggttgtgagcgtgtgtgccgctgagtgtgagtgtgtgagcgagcgtgtgaatggcttgagagtgaatgtgtgtgtgagtgtgaccgtgggtgtgaagggcgggcatggaaacgtgtgatggggtgtgtgtgtgtgtacgggagtatgtgaatgggcgatgtcactgactgcgactgaacgtgtgtgtgtgtgcgatgtcactatgtcagagggtttygcacgtttagcaacaaggaacagaacccggatgacacgggggcatcctcccaatgctcagtgggccaggctcccakcaaggccaggctcccactgaccctgcaagctgtgctggggacctcacactttgcggtgtcagtgctgtttgccccatttcacagatggggaaatgcaaactagtcttggccaccgtcccacaacgctgccgccggaaggagcctgctccatggggtttcaaagtccactctgctgctgtcactcctgggctggcctagagccaccttcccttccccccaggccacctcctctccccagtttctcaaaagttgaccatggtgaggctggaggcttgagtctgtgtggacatgtggaggctgcggctgcagagggcagctctcctgtcaactgtgacccgctaggcgtggggaggctggcacaggaggaatcagcccagtgctcctccacctccacctctacctctatgcctggcatctgccacttggagggcacctgggtcctccctccttggggaggacctggagtctcctccttggggawccaggcaaaaggcctcttggcttgggtggttgctaaggaaagtgtggcccaacccagaacttcgggatgttcagaccccaggcaaccttggccagggtgaacctgtgggcatcaccccaacctccatgcaacacccggcccatttttccccagaaagcatctgcctcctttattgttgaaatgtcctgcctgtgtctctaaagcttcccctggtctccacccaacccttccctgctgtttttggtggtgttccwtaccttccagctggtggttggatttatggccacgtcccctgcacctggctgctccatacatttcttttttcttttttcttttttgagaagagtctctcacccagacagtagtgcagtggcgcgatcatagctcactgcagcctcaacctcttgggcacaagtgatccttctacctcagtgtcctgagtacaggcacgtgccaatatgcctggctaagttttttttttttgagatggagtctctctctgtcacccaggttggagtgcagtggcatgatctcagctcactgcaacctccacttcctgggctccagcaattctcctgcctcagcctcccaagtagctgggattacaggcactcgccatcacacctgggcttcgccatcttggccaagctggtcccgaactcctgacctcagatgatccacctgcctcagcctcccaaagtgctgggattacaggagtgagccactgtgcctggcctaattttttgtatttttaatggagacaatgtcttgctatgttgcccaggctggccacaaactgagctcaagtgatcctcccatcccagctcctcaaagtgctgggattacaggtgtgaacgccgttcttggcctcattccatatatttctgttgaatggctgagcagtcctctgtaaggggcagagcactgcctgggagtcgggagacctccaccaaccctcccccgcccagccccatctctccaagggtgggtggggattaccctttgtgggtgctgctgggatcctcgcttggcscagaatgtctccagcacattctgagccaggcctcctggcttacgggctccccacagtctggaggaggctggctgggggcctggtgctytaggtgtcttatctaagacatgcaggccccatgggaggcctctcccaacactttgtgggatccaggccaggggttggccctggagtctgccagccacactgggaaaacattggagcttggtctgccatcctgaactgtggttcccctgcctcccagcccggctgtgagtgctcagcgaccctgacaggctgacaggtacagtctgccgggctttcctactgtccctggcagccccatgcttactctgcggcccagatcccagctctgtgtccacctgttccttctcctgggttcccttcccccacagttcccagccaagccagagccccccactgcagaacttcctccactccctcccacttcctcccggttagaacaggaccaggagggaggtgccgctcagattctggcaggaccgctggcgggcaggcaggggacaggtaagcaagtcacccgactggcttgtctaagctccagggcagggagctggcacctggggaggaccgggcctgccaggtcgggggccctggcagctctctctgcccacccctaacctggcctgggcagagtggaggccagggtcccagtggggaattccaggggtgggcagctgcgcagggcattctatgtgtggggagcagagctacgcagcccctcagctatggtgcatgagctgggggctccctgggactctggcaccctgtgtccctcttcccctctgtgttattagaggcaaggagaggcgggtgatgggttccctggtggggcagagcatggcttgtgggcattaggtcaggggctgggaggcagctgtctcctgggcccccaggtggctggggtgaggtggtctgtgtgtgtgagtgtgtgtgtgagtgtgcacgcagcacagstgaggaggcacaggggtgggaccttggcctcagccacctgccttctgtttacttggcccactgctggtgagggttggggtggtgctgtggacgaggacggggcagagcctgttccaacccgtgtgggtaggaagagagtgcaccccaccgtgtgagtctggcagggcctctggctttctggaggtgaaaccttcgcccctccactgctcctggctgtggtgcgccctctctgccggtgtctgtctccccgtctggcttgaactcgggyggggcctcctggcctgtgtcccctgcrttgcwcatgggacctgccacctcagtgcccactggggtttgtggactaaacgactgaccgacggkgatggtctgcctgtggctgcctccccagataagaacttttacctataaaaagcccaccccttctctttagtggccagaaagtgtccccgggctcaagtctgtcccctgaggcttggtttcctcacctgaagtgggaggagtcatgaacaggcttgaggactgaatgaggtggcgtgagcagaggctgcccgcctggctccgggcagcccctgttgttgggagcagacactggaaggaaggtccytgactctcatctgctgcccacggcgagcctggccttctgagcagtgcytgactcccagctcagccacgggagctgcgtatgtcctctctgagtgtggaacaggygtggaaacagcctggagccggatcctaagcccacctctgaggcctgtgctcttggaggacaagcgggcttttctgacaaacaggacaggctgtgccgygccctcatccaggagtctgggctcttgtcctggttctggaaacttctaggcaaaataaaaacactgggagggtgggagcctgttgtcccttcactaattcattccacaaatatttgttgagtgctttctgtgtggagtgttggggatacagtggtgacgacagacacagatcctgcggtctgctccagggccacttctggagacttgtggggagccggcrgcctggggttggaggccagcattcggggacttgccatcggagccactaatacgcgggtgtctttttcttggcccagcgcccacccaggctcacttccatgggtttaggtttagggcaagggagggaagtgggaaagcaacagaaaatcagaaaccaggctccaccctgggcctccttgagctacatttgtcccctcattgtcacacggggagcctggttgttcccaccttgcaccactgtgggagggccrgggaggaaatgggggaaggtgcctcgcagcccgtgaagccagctgccygcggaggggccttaagctgggctgtgcactgacrcagctgtgctggaaaaacagaactccagggarcaccaagcacaacyccagctcctaatgtcattcaagttcattgccagggcccccaacaatggtgatttcctgtgaatgtaacttcggccaactttttccctagactctattccacgtgggcgtggtttctgtgactgagggagaggtcgatagcagaggaatcctcggaatagtacttgccccagggagtttccagaagggaccaggggctgtgaaaagtctaccaagggcctggttagctagggaagggctcatcagggaagatttgatgtttgagctaggctctgaggaatgaataggagtttgctggttggatgcatgcagagcaaggacatttggggcagagaggagagcatatgcgaacgcctgaagcaagatgggcttgatgttgaaagagcagagagctgggaggtgagtccagagttggggccatagagagggtgccttcaggtaggcagtggggagctatggtgggtatttgaggaggggtggagccgcctgttggttcggacccccggggctgggggcaggtgctcaggcctcactgtgggaggcaggatgtcagatttgggctgtgagctctttgactggagcagaaagagtgcccctgtcctgggaggtggctcaggaagagcagcactttgggctggacattgagagtccactcccggcccaccctgaatggctatatgaccttggcaggtcacttcatctatctgagggayagataacagtgtcatgtggtgagcgatgcttggagggctggctttggtgtactccgggcaggtcactcccctttcctggcctcagtttcctcacgtgctrggatgatcacagtgcccgcagcctagggttgaggtggggagtattccaggaaacccgcggcccctactcagaacagtgccagctcaggggcgctgaccgctgtgtgcctccttcctccccaccctccccatcctccaggtagggcccggggaagtgaagcgactctcctgccatccttagctgggactcaaaccctggtctctctgacccaagtccacagctgccaactggggccttaaaggaggcctgggatgagtgaaacacctgggccatgctgattaaatgggtrgtggccagagaccccagctgggtggccctgggcatgggtgaggggtgggctaggcatccacagcccttcctttagacccatgggtcaaataccaagggccccatggagcgaggcctcagctgcacccagcatggaggccctgcctgggagagaggccttttgttttaagcccaacaaaggacctgtaactgtagctgggcagcttggagctgctgggccgttgcagggtggggggtgggggggcgggggccaggcctggtgtgaggttgtagcaccctgcccttccttcacttggctattccactcctctcagttggtagtggccccgtgagggtggcaggaaaagctcctgtgtgtgagccgggacttcccaggttatagacccctacgtgacctgggccccagctcatctcatctcacatcgcttcaaggagataggccaggcagtggccctcgctttttacagacaggacacgtggctccaccagagcgtcctcctcaaattgttggagagtagggactcctggtagtgtttccagaaggggaggggcaatggggctaggccttgagaggttaggagcatcttacctggctctgaatagagcagaggcacttgtctgtgttctgcaggatatactacctcaaggggcccgtagcaggtcccacaaagcaagtagagaggcctgcacgcatgcaaggaacttgtttctcagcttcctggcactcaaagtgaaaagggaacttgtagggtaatgataagagaacacacatgcacatttgctgggagaactacaatcagggaggtatatggggagggtgtataaacaagctctgaaacagctttcttgagagccagtgttttatatgaactttggcttctcagcctctctagttgaactaccagtatgggcttcacacactttttattttgaaataatttcaaattactggccgggcgaggtggctcacgcctgtaatcccagcactttgggaggctgaggcgggcggatcacgaggtcaggagatcgagaccatcctggctaacgcagtgaaaccccgtctctactaaaaataccaaaaattaactgggcttggtggcgaacgcctgtagtcccagctactcgggaggctgaggcaggagaatggtgtgaacccaggaggcagagcttgcagtgagctgagatcgtgccactgcactccagcctgggcaacagagcgagactccatctcaaaaaaaataataatttcaaagttactgtaaaagaacatttatgggctggacgcrggggcttatacctgcaatcctaraacttggaaggctgaggctggctgttggcttgagctcagaagtttgagattagcctgggcaacatggtgaaaccgcatctctacaaaaaatacaaaaaaattaccaaggcctggtggtacgtgcctgtagccccagttacttcggggactgggctgggaggattgcttgggtacaagaggtcaaggctatagtgagctgagatcacgccactgcattccagcctgggtgatagagtgaaaccctgtctcaaaaaaaaaaaagagctcttatgtactcttcacccagatgtacctaatgttattatttgctacatttgctttatttctctctatacagtatatatctaatgtatgttaaatatattagatactacatgtgtgcatatccatacagtggacccttgaatggtatgggggttaggggctgacctgtatagttgacagtccacgtataggctgggtgcagtggctcatgcctgtaatcccagtactgtgggaggctgaggcgggtggatcacttgaggtcaggagttcgatgagaccagcctggccaatgagaaaaaaccccggctctactaaaaatacaaaaattggccaggcgctgtggctcatgtctgtaatcccagcactttgggaggccaaggcaggcagatcacctgaggtcagaagttcgagaccagcctggccaacatgatgaaaactcgtctctactaatgatacaaaaattaactgggtgtggtggtgggcgcctgtaatcccacccacttgggatgctgaggcaggagaatcgattgaacccgggaggtggaggttgctgtgagttgagatctcaccactgcactccagcctgggtgacagagccagactccatctcaaaaaaacaaaacaaaacagaaaataaaaattagccaagtgtggtggcgtgcgcctgtaatcccagctacttgggaggttgaggcaggagaatcgctggagcccagaaggcggaggttggagtgagacaagatcgcgccactgcattccagcctgggccagatctgtcttaaataaaagaaaaaaaaaagaaaatccatgtataacttctggttcccccaaaactttcctactaatatactattgactagaagccttaccaataacatatttgtatattgtatgtattatatactatatttttacagtaaagtaagctagagaaaactgttattttaaaaatcataaggggccgggcgtggtggctcacgcctgtaaccccagcactttgggaggccgaggcaggaggatcaccaggtcaggacttcaagaccagcctggccaacatggtgaaaccctgtctctactaaaaatacaaaaatgagccaggagtggtgacgtgcgcctgtgatcccagctactcgggaggctgagacagaagaattgcttcaacctgggagttggaggttgcagtgagctgagaccgtgccactgcactccagcctgggtgacagcaagactccgtctcaaaaaataaataaagagaaaaaaaaatcataaggaagagaaaacatatttactattcattaagaggaagtggatcatcataaaggtcttcatccttgttctcacgttgagaaggctgaggaggaggcagggggtagtcttgctgtctcgggtgacagaagaggaagaagatccttgtataagtgaaccactcagggtcctggccgggcacagtggctcacgcctgtaatcccagcactttgggaggccgaggtgggtggatcatgaggtcaggagttcaagaccagcctggccaacatggcgaaacattgtctctactaaaagtacaaaaattagccagacgtggtggtgctcacctgtaatcccagctactcgggaggctgaggcaggaaaatcacttgaacccgggaggcggaggtcacagttagccaagatcacaccactgtactccagcctgggtgatagagtgagactccatctcaaataaataaataaataaataaataaataaataaatawataagtgaaccacgcagggtccttccggggggtgaccttcagctggccattcgggatgatggactttccatcccagaaccatggctccatttgtccgtaaccttgtggagaagaccccagcactggtgaatgctgctgtgacttacttgaagcctcgattggccgcattttggtactacaccacggttgagctggttcctcccacccctgctgagatccctagagctattcagagcctgaaaaaaatagtcagtagtgctcagactggtagcttcaaacagctcacagttaaggaagctttgctgaacggtttggtggccactgaggtgtcgacgtggttttatgtcagagagatcacaggcaagcgtggcatcattggctagaatgtttgaagaccagtcttaacatctgattatatttgatttattatttgagtgttgttggaccaggtgtgatcagactgctatctgaataaaataagatttgtcagaaattccaaaaaaaaaaaaaagtgaatcaagcagttccaacccatgttcaagggtcaactgtgtctatattttgaaccatttaagagtaagttgcccctttgcccctaaatatttcagtgtgtatctcctaagaacaaggacattcctttgcgtaaccacagaataattacaggaaagtaacattggtacaacactattatctaatccacaagccttattcaattttttttttttgagatggagtcttggctcttgtcacccaggctggagtccagtggcatgatctcggctcactgcaacctctgcctcctgggttcaagtgattctcatgcctcagcatcctgagtagctgggattgcagacgcccgctaccatacctggctaatttttgtatttttggtagagacgcggtttttccatgttgtccaggctggtctccaactcctgacctcaggtgatycacctgcctcggcctcccaaagtgctgggattacaggcgtgagccaccgtgcccggtccccccccactttttttttttttgagacagagtctcgctctgtcacccaggctggagtgcagtggcacgatctcagctcactgctacctccgcctcccaggttcagatgattctcctgctccagcttcctgagtagctggggtagcctgccaccacacccagctaatttttgtatttttggtagagacggggtttcaccatgttggccaggctggtctcgaacttctgacctcaagtaatctgcctgccttgggctcccaaagtgctcagattacaagtgtgagctacagcgcctggcctttttttttttttgagatggagtttcactcttgttgcccaagctggagtgcaatggcacgatctcggctcactgcaacctccatctcctagcttcaagcatttctcctgcctcagtttcctgagtagctgggattccaggcatgcgccaccacatccagctaattttttgtatttttagtagaaactgggtttcacgatgttagccaggctggtcttgaactcctgacctcagatgatccccccgcctcagcctcccaaagtgctgggattacaggcgtgagccaccgcgcccggccttttttttttttttttttttttatggagtcttgctctgtctcccaggctggagtgtggtggtgtgatcttggctcactgcaacctcctccacaggcaaccttctgcctcagcctcctgagtagctgggattacaggcatgcgccactgtgcccgsccagggattcaggttttctaaccaacttttagggtctttttttttttttttttcaacagagacagagttttgctatgttgcccaggctggtcgcgaactactgggctcaagcaatcttctgcctctgccatctgagtagctgggaccacgggcgtgtgacactgcaaccagctaactttttttttttttttttttttttgagatggagtttcactcttgttgcccaggctggagtgcaatggcatgatcttggctcactgcaacctccgcctcccaggttcaagcgattctcctgcctcaccctctcaagtagctgggattacaggcacctgccaccacgcccggctaatttttgtatttttagtagagatggggttttaccctgttggccaggctggtctcgaactcctgacctcaggtgatccacccaccttggcctcccaaattgctgggattataggcgtgagccactgcaccgggcctacaaccagctaactttttatattttttgtagagatggagtttcaccctgttgcccaggctggtcttgaactcgtggactcaaactgttcacctgcctccgcctctcagagtgttgggattacaggctggagccactatgcccagcccccttttagggccttcaggagactgagatgtcgggggcaggggctggggaggaacagcccctcagggccgtgtggcagggtccacttggtcatgaggtatcccagcgtggtataagggatgggtggactctgggtcagctcctcacctgccagctgtgtgactgggtgagtcgctttgcctttctgggctgtttcctcatctgcgaaatggtggtgatgacagtgcctaccacacggggttgctgcgagagccgtgcccgtgtggtacccgacgtggccctgggatcccagaggctgttggctttggtgatctgagctgtagggtctcagctctgggggccttgcagatcacctggtccactcaggttgagaggggaagggactttctcggggtcacacagccagtgaccttcccagtgcctggctcagtgcttcgcttccccttacacctgatggcagaaccccagggctcagggacactcatggatgtcatttgggggaagtggctcagtttactcagcttcactggcttgttctagtgtgctctgtgggagagcaaagaggagagcatcaatcccagtggccccaagggactggatttaaaggtgccatagagccatttggtcagtgtaggcctttcagatagattctgagttggggttattatttgtctgtttgtctaaatcaagctagaacttgacatcacttaataagaccagggaagttgactgaaggaagcaagagaaggaaggagcacaaatacattatgctcaagattaattttactctgagcttcctagtagccaaagtgaaaaaggatatgtgcttagacccacagctctttttggtcctggctcttcagaggaaatggagctttttctcatggtactgagcatagaagcccaggtaatgctcagtgacaggtgtcatgaggctggtctttatagcttstcctagtgggcaccaaaatggatgatgaagctttctggatgagggtggtggggagagggtgctcctggcagagggggcagcgtgagcagaggcctggtagtgtggacaagccggtgtgtttggggaarggcaggctcctgcactgaccccgmgggtcctgtcgtttcagttgggccatatggtgctcttcccagtctggttcctgtacagtctgctcatgaagctgttccagcgctccacgccagccatcaccctcgagagcccggacatcaagtacccrctgcggctcatcgaccgrgaggtgagtgccggccgccgccgctgcctcgtcagcatcacagcattgcccagcacctactctgtgctcagggcatggtcctgctctgaagtagatactgttgtccacccattttacagatggagaaagcaaggtgatgtctcttgctaaggccaccaggaagtagcagaggaatttaaaccctggtctctctgtccacagagccccttctctgaaccacactcactgcctcatgcaaggtcagaatggaaggaacccctcagaacttttaggttcaatcccccatttatggggtaggaatgcagggggtgagagatttgaagataaggtctcctccctcctccccctcccccagagtcattccccacagcctggtactactggacctggacacctttcacatctgtgcagattccctgggtgctctgagctgtgtgggcttcctctgccctgtttgattcttactttctttcattagtgagttcatacttttttttttttgagacagagtcttgccctgtgtcccaggctggagtgcagtggtgcgatctccgctcactgcaacctctgcctccccaggctcaagtgattctcctacctcagccccctgagtagctgcgattacaggcgtgagccaccgcgcccagcctaatttttgtattttttgtagaggtggggtttcgtcctgttgcccaggctggtctcaaactcctgggctctagtgatccccgcacctccacctcccaaagtgttgggattacaggcatgagccgtggtgccyggcctgactcctttttttcaaagctctgattatgatttaaaaccatcctctccctcttttgccttgcccccagtaaaggctgcttccatcggtcacttgccctcttcagagcccctcccttgytctatttctggccacccccagcaggcacaggaggggtgtggcagggaaaactgagtcacagcagagaacatcatctgccagggcccaagtctccaccctgggcttgtgcctggtgcctctgactcaggcttcacaggaatctcaggcttccatggcacggagytggccgtttcctgtaactgttggggcaagtgtctgtaattgtcccaggagctcacagagaagttgacaaccagagagaagcaaaaaaatacaaaatgaaaagtaaattattggccaggcacggtggctcatgcctgtaatcccagcactttgggaggccgaggccggtggatcacctgaggtcaggagttcaagaccagcctggccgacatggtgaaaccccatctctactaacaatacgaaaattaggccaggcgtggtggctcacacctgtaatctcagcactttgggaggccgaggagggcagatcatgaggtcaggagatcgagaccatcctggctaacacggtgaaactctgtctctactaaaaatacaaaaaattggccgggcgtggctgggctcacacctgtaatcccagcactttgggaggctgagacaggcggatcacaaggtcaggagattgagaccatcccggtaacacggtgaaaccctatctctactaaaaatacaaaaaattagccaggcgtggtggcaggcacctgtagtcccagccgctggcgaggctgaggcaggagaatgacgtgaacctgggaggcggagcttgcagtgagccgagattgcgccactgcactccagcctgggtgacagcaagactccgtctcaaaaaaaaaaaaaaaaaattagctgggcgtggtggcaggcacctgtagtcccagctactccagaggctgaagcaggagaatggcgtgaacctgggaggtggagcttgcagtgagccgagatcgtgtcactgcactccagcctgggctacagagcaagacgctgtctcaatcaatcaatcaatcaatcaatatgaaaattagccgggcgtggtggcagatgcctgtaatcccagctactccagaggctgaagcaggagaatggcgtgaacctgggaggtggagcttgcagtgagccgagatcgtgccactgcactccagcctgggctacagagcaagacgctgtctcaatcaatcaatcaatcaatcaatatgaaaattagccgggcgtggtggcagatgcctgtaatcccagctacttgagaggctgaggcaggagaatcgcttgaacctgggaggcagaggttgcagtgagccaagatcacaccattgcactccagcctgggtgacaagagcgaaactctgtttcaaaaaaataaaaaataaaaagcaaaaaaaagtaaatcaccacctcccagatgagaccacacttaaccttgcgatatgattttttgtttgtttgtttgtttttgagatggagttttgctctcgttgcccaggctatagtgcaatggtgtgatctcggctcactgcaacctctgcctcccaggttcaagcggttctcctgcctcagcttcccaagtagctaggattacaggtgcccaccaccacgccctgctaattttttttttttttgtatttttagtagagtcagggtttcaacatgttggccaggctggtctcgaactcctgacctcaggtgatccacccgacttggcctctcaaagtgctcgaattacaggcgtgagccaccgtgcctggccctgtgatatgttttatacttatgtaagcaggcacacatgtttttttcttacccaaatgaaataataacattttgaaacctgttttttaacggtattttcccttgttattgttattggtgggttgttttgtttttgtttgtgtttttttagaacaaggtctcgctctgtcacccaggctgctttctgcaacctcaaactcctgggcacaagccttctgagtagctgggaccatgtgcatgcaccactatgcctggctctgttactgtygttcctttttgttgttgttgagatggactttcgctcttgttgcccaggctggagtgcaatggcacaatctcgactcaccgcaacctccacttcccaggttcaagtgattcttctgcctcagcctcccaggtagctgggattataggcatgcgacaccatgcccagctaattttgtatttttagtagagatggggtttctccatgttggtcaggctggtctcgaacttcgacctcaggtgatccgcccgcctcgacctcccaaagtgctgggattacgggcatgagccaccacgtctgaccctactgtttcttaattccagaaataatgtatgatttatatgtgctcacagcaaaaactctgtaaggtatgacctccacccctgccccattgccgcatcccagggccccgtgcagagggcccaggtcacagctcagcgtgagcctgccagaccctatgtgggtatcacgttcatacacgggtgtgtggaggtgcgggtgtgtgcacactcagtttctttttttgataacctggttttgtagccagccatacaacatggatccttttagtatttcatcatagggatgttacacaagggagcatgtggcagatgtcctaggattgcagctttgccccctcattgtgcccatggtggctttgcggggtccgcagcgggcctgctctgggtgctctgtgctttgccccaccctgctgccctactagaggttggccagcaccataattgttcatctcttgtcctcatttctattcttttttttgagacagagtttcactcttgttgcccaggctggagtgcaatggtgcgatctcagctcactgcaaccttgcctcccaggttcaagtgattctcctgcctcagcctcctgagtagctgggattacaggcatgcgccaccacgcctggctaacattgtagttttagtagagaygggatttctccatgttgttcagactggtctcgaacttccgacctcagatgattcgcccrcctcggcctcccaaagtgctgggattacaggcatgagccaccacgcctggccatctcatttctattcttcctccaaatattttctggtacatgggtgtctgaccttgacccttaggaccagttgatagtcctggaatccacttccagaaggccttggggctctgtttgcccctaatgcagaagcttctggtagaggcagctttgaggcctgggctgcctgggagaggttggtgggccccctgcacacctgatcctgagtggcgtttgcaccgtctttcctgcgatttgcctctgctcacacgtgtagggacgggtctctccttgaggcagctgctctgtgctggaacactgctcaggtcggagagttctcgtactgagccgagatgggcatctgtgatgtcctgccctgttggagaggtctgttgtccccctctaagtgatgacaccatccacatgtggactttgccacgtttggatgtaagcgcctctgcagcrccgaccttccgcatggcttcttcacactccctctcctggccatgctgggtactggggaccccacagggagtgcaccctcaggacgctgggtttggttccagctccgactggaactgattatgtgatcgtccctggcctgagcgtaagacccacttaacaagacctcaggggttttagtctcagctccttccctggcccaatctggctcttagccagcccccctcctcctctgccactgtcccagccactgaccatgccctgggtgcccaccctgtgcagggtggaagcctggctttgggctcttggagttcctgggcagggaaggctcccactttctgccctgtgaagcccacctcagtcctggctgccccatttcccaaggggctctcaggtgcagtggcttctgcagcccctctcttgggatgcaggcctgggcacgtgcagccttgtctagctctgccccagtttgcccatccagccctcaagttcttcctgccccttcaggccactgcttgagctgatggcagagatggattcctccctccccgtcctgtctggcatcctccctttgggaccctgggttcattccctgttctggccaccttgtttgtggcccctctaggccagcaggacagacacacccagcgtgcgcctggcctcagcacctcacacgcagcrtgcatgtgtgtgcatctgtgcttggcgtcggcgtcacgtcttacaaggacaagcaggcactggggaagggtggggacacaaaggaggaatgggatgggggctccgaggcctgggagccgccctgggaggcctctgccctggggaccgttcagcagctttgggcctctctccagatcatcagccatgacacccggcgcttccgctttgccctgccgtcaccccagcacatcctgggccyccctgtcggtgagtcacgcccctgctgggcccattyggagcccggcaggctgctggggcactagatcagagagatggaagctttacatttccaccagggagagcagggaagccttcaggaggaggtgacagctgccctgggcctttgagggcgagtctgttggaatgagagtgggaaggcccagagtccctggcagtggcaccagcaggagtgaaggcatggaggcaggaagctgggacgtgaggggaatccccgggaggggtgggagggggccgtgggagctgacgccaggccaggctttgaatgccgggtggggtgcaggggagtgggttgacaagacccaggggtcacccgcaggatgatctctggcccagagtgaccccgttctgtcctgcaggcyagcacatctacctctcggctcgaattgatggaaacctggtcgtccggccctatacacmmatctccagcgatgatgacaagggcttcrtggacctggtcatcaaggtgaagcctctgggtcatgactgtggagggggtgtgggtgggtggccatggcaacagcccatgtggaccccctggacagggaagtctcccgctcctgccctgtgcagcccagcctcggtcatggctgccccacttcctcaggggcttgcaggggcagtggcttctagagcccctctcgagtccatgtccccccgcagyccggactccaaagacccagtgctcccttgtgcctggtttctgagtaaatagcacgtcatctttaccaacaaaarccaaagaagggggtcttggcagagaacaggggccagggttcagggcaagtgccttcaaacaaggacaggtacctgcagcagaggctccaggaaggccggctggcggtacagacgcccctgctgcgaggtgtgacggcgcagtcccgtccctgctctcacgctgggagatccctgggagttgggtcccgagtgtgcggggtgaggcagccactccaccgtggtcagcggccgggcctctgtgacacgcaggccctgttcttacccgtttccctaagaaatgtccctcaggcctgctagggaaacatgtgaggggctcgtgkggtgttgtctgggagctggggtgatgggctttctggggtctgctgcggggttcgaggtggaggttcacaggagaagatgcaggcgttaggggcagcagcccggaacctgaaacacacatgcygagtgggaagtaagaggcagcatgacggccccagcagggacgtttttatgaaaattagaaatacaagctttcagccaggcacagtggctcacacctgtaagccactttgggaggccaaggcgggtggatcacctgaggtcaggagttagagaccagcctggccgacatggagaaaccccgtctctactaaaaatacaaaaaaattagctgggcatggtggtgcrcacctgtmatcccagctacttgggaggctgaggcaggagaatcacttgaagctgggaggcagaggttgcagtaagccaagatcatgctactgtactccagcctgggcaatagaatgagagccagtcaaaaaaaaagaaatacaagctttcctgcagaacagagggtgagaagcagcctagaccagtgggtatgtggggtgttggagaccctccccaatcaaggccaaagccctatagcctccccagcccagcaccctcaggtacccctggagcccccttactgggccgtagctgaggcccttaccttgccaggtctgggggcaggcactggatctgaagggtgggaagggccctggcccgggctccttccttgctggggcgcccaggcctggcctcaggagcccgtctttggctggaggacggacactggacacatagtcatggggaagccagtgctccctgcaggggacaggtacctgygaccgagcttccagaagggccaccagggatgggtggggttggctggtgagagtggctccctagcaggtgacagtgaaggtgagatctggggctgagtaggcactgaccaggtgaagaaggaagaaaaggagcttcaggtgcaaaggccctgaagtcagcagcaggctcaaggattgaagtggctggagggttggggcaaggggtgggagaggtcagtggggccagacggggccttggaggccccagtaaggtttggggctttgtccagaagcacagaggaggtgatgagggctcaagcatctgttcacgttgaagtctctctggccaaatgtggagaagctattaggaggattcaaattgaggatgaaaaactcacaggtgaccaggcctctcctggcttggagacctggctggctcccttggtccttgataaaggttagagtcctggcctggcacccagggcccaggacagtgtgctctgcctgcctgtccgtggccctccactcccctctgcctccacaccccatagccaccctctgtgctgaagccacaacaggctcccctccctgaggcactgtgtacacgctgtccctcccccrgccaccttccccttctccatccatcagactccttgggcagggtgagccgctcctcctctgtctccccatttctttgtaggtgtcggattgaggcccttctctttcccaagacagtaatcctagagagtgcagggcaggaagtagtcccaagagtgagggaggtttttagcgacagcacaaaacggaagggactgagtgtccaccaggaggagtgtggcttagtgggcctcccagagccttgactttgctgacgggttcagtgtctcccgttgggagggggccccagagacagttggtgaaatgtgagtgcatccagccctggagttggtcggccttgtacacgaggctggtggtttgctttccccggatatgtcaggtggaggctgactcctgggaggacggggtgaaggacggggtgcaggacaggtaggatttgacggctgggtggatggggctccacnggagaaggccatgtgtgggcctcagaagaagctgcagaagaggcacttgtctcccactgtgggcaagagctcgcccctgagacctggagctggggactgagggctgcgggggtgtcttgcaggtttacttcaaggacabccatcccaagtttcccgctggagggaagrtgyctcagtacctggagagcatgcagattggagacaccattgagttccggggccccagtgggctgcyggtctaccagggcaaaggtgattcgggtcggaatcccttggttacacggcaggctcagagaattggagagcttgggcgtgctgggtgcagggtgcaggcccctggctctgtgtggatgggtgactctcgtcaggccagctgtccctctctgggaactgagtctccctggctgtagagggggtaagttgctggcayaggggttgcagacaggccactcctgggggccacgtctcacmcactgccagcctctatttggctttctcagcatctgaaacaagcaagcaagaggacagagctgagcctccgggttcccagcctctccactgctcctgcaccttcctcatggctcgcgttagaatggcagctgcctctacctcggacctcacagtgggggcaggttctccagccycctctccagcctctccagccaccacacatggcatgtttgatggccgggcctcaccccttctctctccccagggaagttcgccatcygacctgacaaaaagtccaaccctatcatcagkacagtgaagtctgtgggcatgatcrygggagggacaggtacacggaaccccccactgaggcgtccggcggctcatgttaagggtggggttggggtgtgggtgaggcgcaggtnctgagtgyctgggagctaccagaggtcaggggcccaggcccagtggtcctggcccctccaccccagtacacctgggcggggcggtgcctgtgaacaggcctcgctcagcacgtgcgaggcccggccggctattttgcaggcatcaccccgatgctgcaggtgatccgcgccatcatgaaggaccctgatgaccacactgtgyrccacctgctctttgccaaccaggtcagtgggcatccccatgatggggaaactcagcttaccctgagaggggacttcgggcctggtcaggtgctgttccaggggtctgcacagctctgctgagattctggggatgaccgggatggggggccctgaatgttctgtgcactggcggccttggcagcagcacggcgggcaggctttgtgrtgcagcgcctgtgtctggctgagggggctgccttgcggggagctccctgagcaccccctcccctggctgcttcctccaaaactcagaactcccttcaccatgagcacggtgtggaacccactggtagagtgggaagaatgctggcctggacatggaggggcccatcttacaaatgaccagacatttgcacgaagcccctgagctacagggtgtcagggcaggatttgaatgttggtgtctctggctcctgattcatatccttgtccacgagcccactgcctgcctgccctggcctgctgtgtggtcttggacgagctactttccctctctgagcttcactccctcatctgtagaatgagctgatgaaactgggttgttgcaaggtcttttcaggttagtgttttgtgactgatgacgtagatttgggggagaagatgcttgcctgaggtccttggatgtgggtccttgccccaccctgcctccccgcagctgcagaaaactgccgcaaggccaaccaagatggccttgccaggcccaggggagaaagagccagaaattctaagctggctggtgtggagggagagagggcagcagtgagacttggtggtgctggttcagagtctgtggaggccgtcagaccgtctgtcacctgtacaggccatctttgcagctggtagcgagggcagtgtggtcgcctcatctcatacctccgaacacaggctccgggaggggcttgactgtgcatgtctcgtgggaagtgctgaaaccaggatgcaaaccagggttttatttatttatttattttgatacaaagtctcgctcttgtccctcaggctggagtgcaatggcacaatcctggctcactgcaacctccgcctcccgggttcaagtgattctcctgcctcagcctcccgagtagctgggattacaggatgtgtgccaccatgcccggctaatttttatatttttagtagagatggggttttaccatgttggccaggctggtctcgaactcctgacctcaggtgatccacccgcctcagcctcccaaagtgttgggattacaggcgtgagccacagtacccagcctatttttatttttaaaaaactattttagaaaacatcattctgttttacgtttttgcaaaccttggaatgtctggcttcrtaggacagctagattcctgtgtttgtttctacatcccatctgtgtgatgttgccagtcacgcagcctctggaaagtggccccatctactgagagaggaagagtgaaaaataccagtgtctcagtattatatgaaaaccatttggcctcagggatcctctccagggtcccaaccccaggggtccccatgctacactccgagaaccgtgccagtcgggtcattgctgctcgtttcctctcctwccttcctccgtgacctcagtgcctggttttgagctgggagccccctaccctcgagtagcagccccccaaggttccatccctctgttcatctgtcaggtgggtcgcrgcggtggccacctcaaaggatggtggtgaggattaaagcatgagacacacttyagctcagagaggaagacataactttttttaaaaaaattgagacggaatttcactcttattgcccaggctggagtgcaatggcgtgaatctcggctcactgcaacctcygcctcccgggttcaagcgattgtcctgcctcagctacctgagtagctgcgattacaggtgcccgccaccacatccagctaattctttatatttttagtagagacggggtttcaccatgttggccaggctggtctcgaactcatgagctcaagtgatccacccacctcagcctcccaaagtgmtgagattacaggcatgagccaccatgcctggcctaaaaagaaagttacacatagttaatagaaaaagaaaagtgaaaagatgcacacaaaaatcctaacagtcattatttctgaagggtttcrggtactttttcttccatattttctgtatttttttccttgagttcatctagcccaaagcctgtccctgtccctgtcctcaccccattagggcagaaagggccctcagcctcccaccctcagaaactggaaaaactgttcaacaccccgtgttccctgggatgtgttgaggcttatgcccctcacacagctcatctgctggaggggagcaccaaggagctggtgattcccgtattcaggcacccttgggctacgcggagggtgggtgcagttccccagccctgggaacagaggagtcacgtctgtggctgcctcctggggagagtccaccccgcccttgcccagcctgggagctcagtagcgatttgttagtgggcagccctttctgggtggcagcgctctttggcccctggtttctttgagttccctgaggtcagggacactgcacactgacctaaggagccccttctgtccctgtgtgacctgcaaacgctgggcagcagcctgtgatgtgatcagaggtggaacgggggtggggggcggggagtcgggtgggggattcagggggagatccctgatagcccctggagggtccaggaagctttcctggaagggatgacgctggactgagttctgtagggctctgtgacagccgggtgggggtgggggagccgcaggccagccaggaggatgggtgtgggcaaggcccgagggggccaggttgggtggggagtggtgtctgtacttcctggtttctggaggtacaacctgaatgagatcccagaacgcaaaaagacttgccggagggctgagggtgcaaaycctgagccttctcacggggccattgcttattgtatgtgttacacccgctcccgggctgaccccctggagtatcttggcacatttcccgtctcttccctttttgctgtcgcgcagcttggccgcctttagttttttccatttttcccactctcrggacatcgagcccatttcctcacaayagcagaagcagttgacacactgagtttctagcgaacgccttcgccccttcagcagcagctttgaggggctccttaggctagacaaggagagaggggtgccagggtgatctctggccgagtcccctcctgaaagctccgcaagcgtgtggcccgcaggcgggcgcgatgacgaggcgcgtctctgttgagtgtctccaggggcagtctgccacccatccttcctgactgcctggccctgtcccctgcagaccragaaggacatcctgctgcgacctgagctggaggaactcaggaacaaacattctgcacgcttcaagctctggtacacgckggacagagcccctgaaggtgagtgagggaggcccctcactgggtgggtgggaggtgccagcccacagttcacctttgcccagctgtttgtggcgttgagcctttggacgacatctggcactcactatggccctgtgggaggcaggtggtgtggccccgtctcacagatgaggaacaaggkctcactgaagccacacagccggaaaccaccacagcccggcctgaaacccaggtcctcgcctccagaggcrgagtcctttcccrggcgcactgcacygcccagctgggcagagaaggccagcgtcccctccctgggcggggctcacttcggggcaagtctcggggcagcggtggcggctgctgcttccacatcccagcgtgcatactctcaggtgctgccgagttacaccaaggccatcttctctcccattgtcagccctggggagtgggctgggccgacgttggggttacccttgttccacctgtccagtggctgagctgcttgccaagggagttgtgggagagccaagctggaggcagcgagtgagggccgccccaccyccaccacttgcagtgaggttgcctctgggagttaaagcgcccttcccttttcggcttcagatagagatgtaggtataagtaatatctcaatttcttctttgctgtaagaaaagcagagctcagccttccccaggaaacattctggtgatgtttagcttcagggctgagagactagggagtggcggcaactgcggtaaattggagcgcatctgcctggtccggaggacacagccccatccgccgtgggcaatcccgctgtggagtatagccctgtgtggccagggcctctgcttttcaagagaagctggggacctgcattttctgggaaatttctaagtgttggaagcaccatttttgaatacccgtgtgagcaccagtttggggtctcatgtcctgccatctgcccctgctttgcctccggcacctcctacggccccacagtttcctcaggactaatccatggtggggggcgcacaccctctgctgatgatccatgtcagggggtgcatgccctctactgatgagggagctctgtccacaccaccctctgctcctcccagaaaggagcacatgggctctgggacttgcaccacctggctagcacctaggagctgggtcacctgggcccrtccctgagggagcagccgcccttctcagatgaccascttgggttccaggcctccaggctgagagacccaggcctggagggggtggtggatgtgtgggttgtcaccgtgtccggcctctggctggacctgctgtcctgggtcagcccaccccctccaggtcggctgctccacctggtatgctcaggaagccaacctgaccccgcagctgaccttccagtgggggaggcagaggactaatgggagcaggtttcttagtaaattatagcgcggttatggtggcggggttcctgtgatgtggggggccaagcagagccaggcagcggctggagcggaggtcagccagggcactggctctgggagtctagctgctgtttctcttctactaacgaaaggagcaggccgggcgcggtggctcacgtctgtaatcccagcactttkggaggccgaggcaggcagatcatgaggtcaagagatcgagaccatcctggccaacatggtgaaactctgtctctactaaaaatacaaaaattagctgggygtggtgkcgcgtgcctgtagtcccagctactcggaggctgaggcaggagaatggcttgaacccgggaggcagaggttgcaatgagccgagatggtgccactgcactccagcctggcgatagagcgagactccgtctcaaagaaaagagcgttttatcctgtacccatgtgtcagtctaaagggaggaagtgataggctgctttgctcctttctgactgcagtttctaatggcatgggcggggccagcttgctgcgaggcagggtttagccccatcccaattccagatgagtgatccagatccctggtgcgtgcaggagcccctgccctgtggccagagcgaggcctggtcccccagggaggggccagtgctgacccctggtggcaacaggcagcagcacctgcaccaccaccacgggacagttacctgccaatgagaggaatagttgggtgatctcctrgcatttttcgtgtacatttgttgccactgtgacccacaattcaagattagttgaggtactgctgtagcattaaatgtaagctgaaattccagaggttgagaaaraaagtggtaacaggccagtctggctgtaccgtagctaagcgaaggatgaggagagccccaaggactccaggcaggggcagtgagtatttcccccacagagccactttcaggacaggtacagggaaaaatacattaagccatgcacggtggcatgcacctgtagtcccagctattcaaagctaaggcaagaggatcacatgagcccaggagctccaggctggagggcattatgatcacacctgtgaatagccactgcctgccagctggggcaacatagccaattcctgtctcttaaaaacacacacacacacacacacacacacacacacacacacamtaaaaagaaatcgctgtgaaattgaaaggtgtcttacatacctgcacattttgtacactagcagtttatgcccatgcagtttttacaaggtactttcagatccacttcagatccattgcccagctataaaactattttctgtgcctcgccttgttccagagggattttaggaggcttacaaagactcatctggtgagtcagagtggcacaaatggaaagtgggagtgaaagaaaaacaagtgcagggctataaaatgaatggaatcagtactgggatttgtacaaaaacggactataatgtacgcttgctgtgaatgggccacacgtatcactccaggcttcccagcagccaaggtgaaaagggaaatgtggtcagtgacttagctcatggagtccatgagataaagaggacccccttgctcagcacagtagactcttcctggttccagggcaagcgggactgctttggcccctccccgtcaggaccttcacagcgtggagtgtatgctgtaaacttgggccatctaggcagggtgtctgtgtcagccagtgccagccctcctggcctgaggcttcagcagcttttctcttggtgttgagggctgtggggtggttgtttctggttactaaggatagagaccagccatatcatcgtgggcgctcagggctcgagggggcaggacacacagctgtggatgagactcagttcctcatgggccgacattcttggggagtcacagtgggctcatggaggtgggggcagttagagactgtcaccctgagcagcctggggcagagcaccagcctggggacctctggatcctggaaggtacatctcagtcgtgtccctgcctcattgtgtgatcttgagcaactcaactctgggtcctctgggcctcagttgccacatctgtaaaatgggattcatattccccgccctgtccacccactgggttgttccaagggacaccccggaggccaaatggaagcaaaaggctttgcaaactgtaaagtgcagtcaggggaaccatgatgggctttgtacactggtttcaggctgcagggcctgaggccataggcttgagtcagggttgggggcagggggtcctggtgacagtttgctgggatcagcctctccattcttcagcatttaaggaattcaccgcctagggttggtcggtcagcaggttggtgaccacacagccacacgtcagcttacctggtctctcaccccacagcctgggactacggccagggcttcgtgaatgaggagatgatccgggaccaccttccacccccagaggaggagccgctggtgctgatgtgtggccccccacccatgatccagtacgcctgccttcccaacctggaccacgtgggccaccccacggagcgctgcttcrtcttctgagggccgggcacggtcacacggccacccgccccgcgcaccccacgccctgttcacgctcaccyrgtcacctccccacatcgcacactggggccccrggttcagcctggcctgcccgtgccctggtgaatcacctggctgagcagttcccctggagccccttcgggagcagggctgtgtcccagatgggccacggctgagccttcagagtacgtcctgcctggcacttactggtccttaccagagacgcccagccccatccctgtcctcatgacccctcgtccaccccmcacacacactataaggctgagggctgccagcagccccgtctgcccaccattcccggccgtggaccatagtcgggatgtcagcagacacacatgggcagcccaaagctgcaggtgccagggcccaccccagcctcgcctgtcacccccactcccgcctcagggccaggcccaggcctcaccacctgacgctgcatgagacattgacaccagaaagccctcttgggggcactgctccctacccmagggccctggccagccgggagcttggctctcctctggctagagtgggaagagggggctggccatggggccctcccagaacctcagcatttccttccagcccatccaaacactgaggcagccttggggaaccccgagctggggggttggcagcccactgcaccgcctcagggttttggggtcctgggctggggccaccatccctgatggcagaactcccacaaccacatgtatttattcctctgtcctaaaccgtcccctccttccctcacccccagcacagggggattytgagcagtgcctcttgtctgagggacatatcagtgacctcgacgttgcctttagactacagttgtgttagcctcttgcgtattggctttttcagagtcatttatgagcagaaaaaaaaaaagtaaaactttgctaatattaacccttctctagctcctcgagggtctgtgacctgcaacacaaggggtggggtcaggaaagggctggggaagacctagcattttttttttcttttttttttttttttgagacggagtctccctttgtcacccaggctggagtggcatgatctcagctcactacaacctccacctctcgggttcaagcgattctcctgcctcagcctcccgagtagctgggactaaaagtgcccaccaccacacccagctagtttttgtattttttttttttttttttttgagacggagtctcgctctgtcgcccaggctggagtgcagtggcgggatctcggctcactgcaagctccgcctcccgggttcacgccattctcctgcctcagcctcccaagtagctgggactacaggcgcccgccactacgcccggctaattttttgtatttttagtagagacggggtttcaccgttttagccgggatggtctcgatctcctgacctcgtgatccgcccgcctcggcctcccaaagtgctgggattacaggcgtgagccactgcgcccggctccagcatttatttctgatgtatctttgtggtagaaaatttggaaagtgcagagaagtatacacaggaagaaaaattcccaacccccagaggcaaaccagctgaaaccacgcaaccccagtcaccccaatgcaccgcgaggctgctgcctcctgtcagggtcagatgagcctcgaggctcaggaaagtcagaggatgccatctgcatggtggtaaattacagaggtgatgaggcaaggtgggtgtggggctgttcttaaaacggggcagcaggaaggccccaaggagatggatttgggctgggacgggaagagagagctggccatgctggggtgggtgggtgttcaaatggtggaaacagcagacgcaaaggccctgccgttggaaccagcttgtggaataaactttcagaaacagatcgaagaagataggtggctggaaggggcagcaacgatgaggctggagagggaggcggggcyaggctggtgctccggagacttgctgggtggccctaggagcacagtgaggccagtgtggctggaggggagtggggaagaagaggggacggggcaggttcacaggaaggagggcccaagaccaacctaggggactaggagagccctgtctcctctcacttcgcattttccattctgtctctggccacctcactacctacagtggcaggaaaaggaatctcagacccaaaatgaccttcacactgtggcgggggactgctagcaatggacacgcgttaggtttcatcctcatttctgtccctgtctgaggctgaaaggcacaggatttgaacacaggcctgcctgagcccacaagaggctgcctcctgggaaaggggacgtgggaaaaggggatcaattggacccgattcccaccctctccaggtctgtttccccattcagaaaatgggagagggctctaaggcagcgattctccatacagactcgacacctttattatttttgggacggagtctcgctctgtctcccaggctggagtgcagtgacacgatcttggctccctgcaacctctgcctcccaggttcaagcggttctattgcctcagtctccggaatacctggggattacaggcgtgcaccaccacaccggctaatttgtttgtatttttagtagagatggggtttcaccatgttggtcagactggtctgaaactcctgacctcaggtgacccaccctcctcggcctcccaaagtgctgggatcacaggtgtgagccaccatgcctggccaacacctttaaaataacagttgtaacgggccctttacgctgcagaattcacaggcagtatcacctacctatacgaagaattttaaaaatcaacacagctctaaatgagttgtaaaagaacaagaaaggaggccgggtgctgtgtctcatgcttgtaatcccagcactttgggaggccgaagcaggtggatcacctgaggtcaggagttcgagaccagcctggccaacattgtgaaacccccgtctctactaaaaatacaaaaattagccgggcgtggtggcgtgcgcctgtaatcccagctactcgggtggctgagacaggagaatcgcttgaacccgggaggcggaggctgtggtgagctgagattgtgccactgcactccagcctgggcgacagagcgagacaccgtctcaaaaataaaaataaaattgtcctccgcatctgccctacactgcccagctgaccccactggccagcctgtcctcctcccacctcttgcgcgttcctcctggcacgcctggaagggaggaaaggcttaatggtcccgttctatgggtgaggaaaagaggtctgggaaggagcccggcgtggtggggcgggcctgtaatcccagctactcaggaggctgaggcaggaggattgcaggatcgctcttacccagtttctttctttctttcttttttttttttttttgaaacggagtcttgctctgtcgcctaggctggagtgcaatggcgcgatctcggctcaccgcaacctccgcctcccgagttcaagcgattcttctgcctcagcctcctgagtaggtgggatttcaggccgtgccaccgcgcccggctaatttttttctttctttttttttttttcagtagagacggggtttctccgtgttggccaggctggtctcgacctcctgacttcaggtgatccacccgcctcagcctcccaaagtgctgagattacagacatgagccaccgctcctggcctcttacccagtttctgcacggagctcctgatgcctgatggccaagaggacataaccccacctgttctaagggcatggagtgtatttttagagtgattggacaaaatatgtgccgaacacctacgtcaggtctggcgcatgctggaggctggggttatatcaatgcaaaagccattccctgtatttaacacgtaaatgaattagtctctttaactctcccaacgccctataaattatttgctccattttacatattaaacgctgtcacgaactgagctgctgtgtgaggccggggccggacttatctttctgaagcacagagaagcggttatacgcagaagtttgggagaactgggtaaggccgcacacatggaaattgccagtttcgtgggtcccaacgtcaatactgtgggcaaccttagaccggctcaaagcgcagctggggacggtgatgaagtgcagagcgtccacagccagcgacaagactgccaagcaactggcagcctgagtaacggagaaaacaacgaaaaaaacgcattcaccacctaccaacaagaaacaaaaaacacgaccaccccacagtcagtctactttttaggcgtgaatarggtcgggcagatcgcaactcccaggcatcccgcaaagtaggcgggtcaccttgagggygacctttacccgctcaaaaattcrtctcacattagcagtragrattcgggcgtcaccccgaatcgttattttccttactcataagtttaaggcataagracgtttttagtttatttcctaggtaatgaattctattctcattaggcstatgatgactatcgtagttgactgttgaggtcatgatccagttccattgaagtttgtctcacttgttaataatgtattttgttgcttttcatttaattttttccctcgaggaaaataaataattcataatgtgccgaacttccgtatgcagatgagcagccagcaccgcgaaggctcacggggaacgtccccgccccttccggttcttgcctgctttgagctggctgtcgcgagagttggtccgcggacgccggaagtagttcgtcgctccctagcggccgaaggggcgggctcgcggggtctcgactgctttcggcttgctcggcggagcaagatggcggacatctccctggacgaactcatcaggaagcgcgggrcggyggcgaaaggacggtgagaggcctttcctttcttcggggtttagggtcctcggcctagtggagctcgaggcgggggaggtagcgatccgggagcgacgcggaggaccgggtgcgcccgcccccgaccacagccgcgctcctcattggccggctgccgccgtccccgccgtggccccgaccgcccgcccactggccgaggcgcagtccctctggcggccctgggaggccgacggggccgcggcggggacagggtgccgcctcgtggacctgaggggctgccccctggggcccccgcgttccggggtcctggggtctcggcggcgcagcctccttgcctgtgtggactggcatttgggccccgctccgtgatctcggcgctgcctggtctccacccatcttagagttgagacaaccgaagtttagtagcggggaagtgacttgctccgaccgccgaagctgaggcgcaagcccaaatccccctgcacgcggcccctgttaacactcgcctctctttgtgcggcgttttaagttttctgagccctttcatatacacgatgcctcatttaatcttttacagtcctgttgtctgctagctattcatgttacccaccttttactgatggggaacttgaggctggaagtggtagagtgacttgcccgaggccacggagaactgagcggcgggctgagcgcgatttaattgctggctgagttggcctcctacatgggcttgaaaaactggtgtgttgggcaggagattggttatttccttagggagaagaaagtgcttgagctggctgaggagccatggaggtgatttgcagtcatgtctcccaaacttcccctagacccttaaatgttgttagtcatttcaagccttcgtgagctgagttcatctgtatgaagaagtgagaactttgcccaatagtttcccaacacacattaagtttaaatgtctttgtaaatagccaggatgtaaatatgttagatattgttttctcagacatttgttctctcagcagatgtttatttttatttttatgttttttttgagacggggtgttgctctgtcgcccaggctggagtgcagtggtgccatctcggctcactgcaacctccgcctccccggttccagcgattctcctgcctcagcctcccaagtagcagggactacaggtgtgcaccaccacgcccggctaatttttgtatttttagtagagatggaagtttcactgtgttggtcaggctggtttcgaactcctgacctcaggtgatcctcccgcctcggcctcctaaagtgctgggattacaggcgtgagccaccggcccggccattccgcagatgtttattaataccacccgtatgcctgtggttaggtttttctcttgatgtctgaaatgtatccctcacctccttccccatcctggacacttgtatcaactacaactgccaccaccacctcataattcgcagccagcacttacctggcttgtggttcgtaacgggcacacattagtatttgtttcctcaactactgactgtgaaagctctctcagatctccatctagtgactgatgtgaagctggtgctggctcctctggccacttctaagtccatccacgttttgtaggttcctttggaaacgacagaatgatccaccccaggttcttctctctctgaggtcactccgccagtttctgactgcaggtggactgcactgtagtctatttgatctctatgtttttggttttagtgtgtgcagagttttgtgttgggcagtaggtggggctgcaggaatggggggtggttatgtgtggatccacaggaacaggggccttgcagctggatacacctggcacttgccactgttgggttctgtttccctggccaggggagttctgaactaggcagtttcctcacttggaatggtgattcctggttgagcgggattaaatgtgagaagggttttttttgtttgtttttttgagagggagtctcactg

SEQ ID NO: 96112 - DNA, 23202 bp, Homo sapiens
  misc_feature (1)...(23202): n = A,T,C or G
cccatctctactaaaaatacaaaaattagctgggcgttgtggcgggcacctttaatcccagctactcgggaggctgaagcatgagaatcactttaacccgggaggtggaggctgcagtgagtcgtgatcacacctctgcactccagcctgggtgataaagcaaaactcaatttaaaaaaaaaaaaaaaaaccacacacgtgtacacattacaacaataataccaggtgtgcccattccccagttatgaccagaacattacgagagtcctaggagcgccctggtgacctccccagcgattcctcccctccccagagatcacctttactttgacttgggttgatcacgcccttgctttcctttagggttttatgaatcccacccgggtgtgtttccctgagtactatgtgtgcagagaggcagcacacccccagctggggcagaacaggcaccatggccaggccagaagactcccgggaagataaactcagctgagcgcctggggtacaggctgggcccggcctctgtgggcactgacaagaggcccctctggggcaggcagagggcatggttgtgggtggggctcccctgtgaggacgttgagcacagctgtggcatgcgcattcagcaggaaatggtcaggggcatgagctgttctgtctcttgcttctgagctcacagtgccctgaggagtagggtgctcagacctcaggagcaaggtgaggcctgtcaggtgagccatgtgtcctcagcagacccaggcagcagggcgagaacagggcttcctcagcctgtgatagggaccagtcaggtgcaggcaagaatctgggccagcgtcaggtgcaatggctcaagcctgtaatctcagcactttgggaggccgaggtgggcggatcacgaggtcaggagatcaagacaatcctggctaacacggtgaaaccccgtctctactaaaaatacaaaaaaatagcagggtgtggtggcgggcacctgtaatcccagctactcgggaggctgaggcaggagaatgcttgaacccgggaggtggaggttgcagtgagccgagatcatgccactgcactccagcctgggcaacagagtgagactctgtctcaaaaaaaaaaaaaagaatctgggccaggcttgtggggcattctgtacctaaatgagcagcatggcagtagggatgttggtaatgccagctctcaacacatctcaagtcacgctgctccccgctggacaggctgcacaggtccagtacacacaccatgcccgggtctttcttcaccacctccgccccctcctgcatgggtccttatttcctggatttcacatcttcctctttcttggtccccccttgcttgtgttgagcctatcctccaggagttcttgagaaagactgcccggaaggtaacattgctgaattcttgcatcctaccccatagatggctgatgcttggctgagctggagatcgttgtccttcagaatcatgaagagatgctgttggccagctgccacactgcggttgagcaggctaaagccattctgtttcggaagtctttggttgttttttgttttgtttttatttttttgtagacacagggtcgcgctatgttgctcagacaagtttccaactcctgggctcaagcaatcctgctccggccacgctgtggatcctttatatgtaaccgattttgttcttcctggaaagtttttaagattttgggccccagagttctgcagtttcacactgatattcccctatgtgggactaatttttttttttttttttttttttgagaccatctcactctgtaatccaggctggagtgcagtggtacgatctcggctcactgcaacctctgcctcccgggctcaagcaattctccctcagcctcccgagtacctgggactacaggcgagctccaacacacccagcttcatttcctccactgtgcctgcactcaacaggcactttcccgctggaagctcattctttacttttcagaagttggattatttctttgatttccttccctctattttctcacttctctttcttttcaaatttatgttgtgcagcaatcacttcctttctggaactcctattactcagaatgtagggcctctagggctgtttttctaacttcctttttctctctctcttttttttttttttttttttttttttgagacagagtctcactctattgcccaggctggagtgcagtggcataatctcggcttactgcaacctctgcctcccgagttcaagggattctcctgcctctgcctcccgagtagctgggattacaggcatgtgccatgacgcctggctaatttttgtatttttagtagagacagggtttcgccatgttggccaggctggtctcgaactcctgagctcaggtgatccacccgccttggcctcccaaagtgctgggattacaggtgtgagccactgtgcccggccgtcttttttttttttttttaatatcacctgttattttagattcgggggtatatgtgcaggtttgttacatgggtatacagtgtgatactgaggtttggggtacaattgattctgtcacccagatagtgaccataacagtagtaggcagtttttcaacccttgcctcactccttcccacctctaggagttcccagtgtccattgttctcatctttatgtacaggtgtatcaatgtttagctcccacttgtaagtgaggacatgcggtatttgattttctgtttctgcctgaatttgcttaggataatggcctctagctgcatccacgtaacttccttttcttgccgacttttcttttttttttttttttgagatagagtctcgctctgtcacccaggatggagtgcagtggcgcaatctcggctcactgcaacaacctcgcctccgcggttcaagtgattctcctgcctcagcctcctgagtagctggaactacaggcgcgtgccaccgtgcccggctcattttttgtattttttagtagagacagggtttcaccatgttggccaggatggtcttgaactccagacctcatgattcgcccgccttagcctcccaaagtgctgggataacaggtgtgagccaccgcacccggcccttttttttatttttggagatggagtctcactctgtcacccaggctggagtgcagtggcacgatctctgctcactgcaacctccacttcccgggttcaagcacttctcctgcctcagcctcccaagtagctgggattacaggcatgtgctaccacacctggctaatttttgtatttttagtagagatggcgttttgccatgtttggccccactggtcttgaactcctgaactcaggtgattcgcccgcctcggcctcccaaagtgcttggattacaggtgtgaggcactgcgctggctttttttttttcttttcttttcttttttcttcagatagggtctccctctgtcacccaggctggagtgcaatagttcagtcctggctcactgcagcttcatactcctgggctcaagcagttctcccgactcagcctcctatgtagctggaactacaggcacgagccacagtacctagctttttttttttttttccttttgtagaaacagggtctttcaagtatctgcttttgatgaataaaaaagaaaacagtgtgactatgttgcccaggctgctctcgaactcctggcctcaagtgatcctcctgcctcggcctcccaaatcactgggattacaggcctgagccactgtgtctggccaataattttctttttttctttttcttttttttatttgagacagagtttcacacttgttgcccaggctggagtgcaatggcgtgatctccgctcactgcaacctccgcctcccgggttcaagcgattctcctgcctcagcctcctgagtagctgggattacaagcatgagccactgtgcctggcccagagacccctttgtttgtccctttccggtgaaaccccagatgggtcccaaagtgggggaggggcatcacccagtggctagggaggtggaggggacctaaagatctgtttctcaaaggcacctccaaacaatcctctttgttttagccttctttcactcttagatctagaagcagcagcagctgctacctgttcttaagtttttgaggattctgttgtatgcataaggattggctcgcagccttccccactcctgggagggatttagctgtctgagatcagctcggtcaggtaataccagcctacctgctttccagcttccagagattctgctgctggcggtcccctttcctgttcttcctgtccttgtggatttatatctttaaatatctctttgttgtggatttatgggcttccagaggcagtgctctctctatgcgtcttaacctgaaagtgtcctctgtgtgtgtgtgtgtgtgtgtatatatatatattttttttgttttttgtttttttctggagatggagtttcattcttgttgcccaggctggagtgcaatggcgcagtctgggctcactgcaacctctgcctcctgggttcaagcaattctcctgcctccgactcccaggtagctatgattacaggcatgtgccgccacgcccagctaatttttgtattttttgtagtgagggggtttcaccatgttgaccaggctagtcttgaactcctgaccccaggtgatctgcccgcctcggcctcccaaagtgctgcgattacaggcatgagccaccgcacccagccttttttttttttttgaaacggagtcttgctctgtcacccaggctggagtgcagtggtgggatctcggctcactgcaacctctgctgcccgggcttaggggattctcctgcctcagcctcccgagtagctggaactataagcgcccaccaccacgcccagctaatttttgtatttttagtagagacggggtttctccatgttggccaggctggtcttgaactcctgacctcaagtgatccatctgcctcagcctcccaaagtactgggattacaggcatgagccactgcgcctggccgagcctgtgtctcttgagttgcttttaggttaacattagataaccccaatttccaacctccattctgtcactaaccacctgtcactcaatctctgagcagctatccatcacagcgttgctgtgaggaattaaataagctaatatctgaaacacattcaaggctttgttcaatagcataaagatctattggatgcttattatgtgccaagcactgtgtggtttgtaagaaaacataaaagagagctgttgtatagttgggaactggcaacggatggtcggccatgccaactcctgtggttgggaggatcatatgcaagaaatgtggttgctggccgggcgcggtggctcacgcctgtaatcccagcactttgggaggccgaggcgggtggatcacctgaggtcaggagttcgacaccagcgtggccaacatggtgaacccgtccctactaaaaatacaaaaattagtcaggcatggtggcgggcgcctgttaatcccagctactcgggaagctgaagcaggagaatcgcttgaacctgggaggcggcggttgcagtgagcaaagaacacgccactgcactccagcctgggcgacagagcaagactccgtctcaaaaaacaacaacaaacaacaacaacgacaacaacaaaaaccatcaatgtggaagagtttcaagtgctcttcatgtgccaggtagaaagcgtaaatattacattgcgttgcgttatttattccataaatatctgttgaggacccactgtggtgtggcatcgtgttccgttcaacggctatggctgtttaagtaaacgcatgagtccctccaggaccccagaacgcagcccgaagggcctcagagccggggcggaaccagcgtctgcggaacctttcttcccgctcmcggtgccccggaagccccggcaggaaatgcgwcagggaccacgctgcgccgcgccgccgcagtcgggcctcggtcgccacggtaacgcgcgcgggcaggtgtccgaccatgagcgtccgggtcgcacgggtagcgtgggtcaggggcttgggcgccagctaccgccgcggcgcctcgagcttcccggtgcctccgccgggcgcccagggtgtagcggagctgctgcgagatgcgaccggggcggaggaggaggcgccctgggcggcgacggagcggcgaatgccgggccagtgctccgtgctgctcttcccgggccagggcagccaggtggtgggcatgggccgcggtctgctcaactacccgcgcgtccgcgaactctacgccgccgcccgccgcgtgctgggctacgacctgctggaactgagcctgcacgggccgcaggagaccctggaccgcaccgtgcactgtcagcccgcgatcttcgtggcatcgctggccgctgtcgagaaactacatcacctgcagccctcggtgaggcccgaggccccgtgacaggagggggaaggtgagctctgcctgagctcttggccctgccagaggcttccgcctgccattccgggggctcccacgtcttactcattcgatcgagtttttttktttgtttgtttttgttttttttttttgagacggagtctcgctctgtcgcccaggctagagtgcagtggcgcgatctcggctccgcctcccgagttcacgccattctcctgcctcagcctcccaagtagctgggactacaggcgcccgccaccatgcccggctaattttttgtatttttagtagagacggggtttcatcgtgttagtcaggatggtcttgatctcctgacctcgtgatctgcccgcctcggcctcccaaagtgctgggattacaggcatgagccaccgtgcccggcccgttttgttttgttttttgagacagagtcttgctctgtcacccaggctggagtgcaatggcgcagtcttggctcactgcaacctctgcctcccaggttcaagcagttctcctgcctcagcctccgcagtagctgggatcacaggtgcacaccaccacgcccggctaatttttttattctttacttaaatcctcccaggttcacccacctcggcctcccaaagtgctaggattacaggtatgagccactgcactggcctaaatgaaggaacattgagatgagttgagaatgtcacttcacttgaaggtggtggattgattgctattaatatttaataagacggtaaatgttaagctagcacttgagatcctttaccctatttcaccttcacaccaccttgtgaggttaatactgttatttgatggttgaggaatgcagactcagggatattaaaagaattagttaagtggtcctgttgaatcgtcatcataatattcattcactgcttaccctagtctgggtctgtgctaagcactgtatagacattatattcacataattctctcatccgccctttggggtaggccctgttcttccctcatttcacagatgagataaaaatgctcttggccgggcgaggtggctcacgcctataatgcctataatccagcacttcaggaggctgaggtgggtgcatcacgaggtcaggagttcaaaaccagcctggccaacatggtgaaaccccgtctctactaaaaatacaaaaattagccaagtgtggtggtggacacctgtaatcccagcaactcgggaggctgaggcaggagaattgcttgaacccgggaggcggacgttgcagtgagccgagatcacgccattgcactccagcctgggcaacaagagcaaaactccgcctcaaaaaaaaaaaagtcatgctcttaacttgtgcacaacgatatggcctgagagcctgctgcagggccatggcaagggaatccagagccctgggttggcgtcagtgtgaccatggacggagttgatggactgtaactaaccaggaaagctcctcctaaataaaggggcaggactcaatgattgtcaaggtcacttttgtgtgtcctcttccagctggtgcaccaagttcgtagaacctggctcactgagatgctgaacaccccgccagctctcaggtacagagccctggaactgggatccccaggagagtgagggctcacgttctgcatctgtccccacaggtgattgagaactgtgttgctgctgctggattcagtgtgggagagtttgcagccctagtgtttgccggagccatggaatttgctgaaggtacaggaaggagtttggttttatgcaaggctgtggtcttgggctcattaggggtaagggacactgccaaaaatgatactggacccactcaggtgatgggaagggagcacatggacaggggtgacattggcacatgaggacagggctttgctgtgattccttttcaagactgaaggattcattagggatttcccttatttttgtaatctcatgaaatctgcttgctgaactgtctaacccgctatcctgtgcactcatacctgcagcacctgcaacacgagagtatgtgttcagtagatattcgttgaattaaagagtaaataaatattggatctggagccatatcagttttacttcttaagatttttgctggccaggaaccatggcttacgtctgtaatcccagtgctttgggaggccaaggcaggaggaccacttgaggccaggagttccagaccatcttgggccacatagtgagaccttcatctctgcccccaacaaaaaacaaaaattacgttgggtgcagtgattcacacctgtaatgccagcactttgggaggcagaggcagatagatgtttgagcccaggagttttagaccaccctgggcaacatggtgaaaaccccatctctaccgaaaatacaaaaattagccaggcatgttggtgtgcgcctgtagtcccagctcgagtacttgggaggatgaggtgggaggattacctgaacccaggaggtcaaagctgcagtgagctgtgatcgtgccactgcattccagcctgggtgacagagtgacaccctgtcacacacacacacatacacaaaattagctgcacttagtggcatgcatctgtaattccagctactcaggaggctgagggaagatcacttgagcccctgagtctgaggctgcagtgagccacgattgtgccactgcactgcggcatgggtgacagagcaagaccctgtccaaaacaaacaaaaaagaatctagtatagaaacacgagaggttattgggactggagagggagaaatggagagtgcctacatagtggacatggagtgtttgaaactagagagagttggtggttgtacaacattatgaataccccaaataccactgaattatacacattaaagtggttaattatattttatgtgaatttcactgcagtgctttttttttaagcgttataacattattaaggaaagtttcataatttcacattttatgaaacaattttattacatgtatcattttatgtgtacataatgtgcagaattaggcttggtgtggtggctcacgcctgtaatcccagcccagcactttgggaggccaaggtgggtggatcacctaaggcaggagtttgagaccagcctgaccaacgtggtaaaaccccatctctactaaaaattcaaaaattatctgggtgtggtggcgtgcacctgtaatcttagctacttgggaggctgaggcacaagaatcacttgaaccaggaggcagaggttgcagtgagccgagattgtgccactgcactccagcttgggttagagaatgagactctgtgtcaaaaaaaaaaaaaaaaagtgcagaattatagcatagttacacttttgtgttttctttttctttttcttttttgaggcagtatcttgctctgtcaccccagctgcagtgcagtggtgcagtcgtagctcactgcagcctcagcctcttggcctcaagtgatcctcccgcttcagtctmcagactaactgggactacaggctcacaccatcatgcccagctaattttagaagtttttgtagagatggggtctcgctatgttgccagggctggtctggaactcctgactcaagtgatcctccagcttcagcctcctacagtgctgggattacttacaggcattagccactgtgcctggcctacttttttcccttgacattttacatagttttgaatgtctctgtgggaggatgtctgcgtgctctcctcccttttcttgtatgttttcttctacttcttgtcacaggctcttgttcatttgttttttaagagacagagttttcctctgtcttccagccttgagwgcagtgatgcaaccatagctcactgcagcctctaactcctgatctcaagcagtcctcctgccttagcctcctaagtacctgatgtcacaggctgtttatgtatttgtcctcctgttcttgtgtaagggagctaaaagtccagtacatagaagtgctaagtgaatgaagatatgtcaggatttgctccttagacctctctgttgacctgtgaaacactgtgcaggtcccttaatctcttctcagtctggtcatctcttctctctgcccaggaagcaggaccagggtgtcgggggtctggtagtttcaggccattcttatgtgtggctttgtagggatttttgagacagggtctcgctctgtcacccaggctggaatacagtggcatgaacacagctcactgtagcctcaacttcctgggctccagcaatcctcccacctcagcctcccaagtagctgggaccacaggcgcacactgccacgcccggctaatttttgtatttttggtagtgacagggttttaccatgttgtctagtctggtctcgaactcctgagctcaagtgatctgcctgccttggcctcccaaagtgccggaactacaggtgcgagccacagcgaccagccctcaggccactcttattatcattggcactgcctgccctctctccatgctcttgagccacactgaatcaggagtcataggttttcgttcatctgcattggctgtgtcaggttctccagctctaagtggggacagtaacacttgacttatgacaattatgtcactgaaattcatgtagtacagtagcccatgtctctgatggttcttttttgttgttcttgttttgagacagggtcttgctctgtcaccaggctggtgtgcagtggagcaatcatagcttactacagctgcagcctcaacctgctggtcacaagtgatccttccgtgtcagcctcccaagcatctgggactacaggcaggcaccaccatgcctggctaatttgtattttattttttgcagggacagggtctccctatgttgctcaggctggtgtcgagctccttgggctcaagccgtcctgcctcagcctcccaaagtgctgggattacaggcataagccaccatgcccggcctgatctctcttaataaactaactaataataattcccagctttcacaacagcccaggcagattagatattattatcctcattttactaactaaaaatttgaacctcaaggaggttgtgacttggctaaggcaatgtggcttccaccctgttcctctttaccttttaccagggtttctcaatagtggcactatttwaaaaaaaaaaaaaacagtggcgctattgggccaggtcatttgttttgttgggggcaaggggggctgacctgtgcagtgcagcatgttgagcagcatccctggactctacccactagacgtcagtggcactctcccctagtcagaacaaccggaaaacgtctccggacactgcccccggcctgttgagcaccactgtcctactccaaaccagctttatagcaggaagctccttgggttagtktgtatagtgccaagcacagcagcatacttttggtggtgagcgcttgtgcagtcgatggaggtgtgtggaactgtggccctgctggctsgtggyagacaccagtgcccctgtctctagtgcagagtggagcttgggctttgtttctcaggcctggncttttctccttcattctgtgccctcatttttccaaatgcgcttctctctggccaggtttgtatgcagtgaaaatccgagctgaggccatgcaggaagcttcagaagctgtccccagtgggatgctgtctgtcctcggccagcctcagtccaagttcaacttcgcctgtttggaagcccgggaacactgcaagtctttaggcatagagaaccccgtatgtgaagtrtccaactacctctttccagattgcagggtsatttcaggacaccaagaggtgggtgttgatgggaactgccttcataggccagtccagtacggagggttggaactgctccacacccgtgaggcctagcagtctggcgggtgctgggtccagcccggtcttyaggaagtattttggggccagggcagtgaggtagaccgagtgctgcaaagcaggcaggagcaagaatgctgccctgctccaccacgtgtagaatggggtctggaaccaaccagccagcccatgtctaaagtaaaggggcagggccagctgatctccagggcccttcccgtagtacattctgggcttctgaggagcctgtgatctggttgcttccttagagaaaagagatttgttttctgctagattgctctgcctgccctgctttttttaggtgtctgtttttgccctggagttcatttcctttccaccgtatttccttccatttgctacttccccaaacatttatcaagggctggggacgcacagactgattagccagggttcctgccgtcaaaggaagagccccgtgaatggatgactccaggccgaggggtgcagtgagggtctggctggctactcatgggcctaagagcaacccaggaggcagcagctggaggacgggcatgtgtttgccagcagggggcaccctgagcagagcggcaggagccccctacagaaagagcagtgggtgctgagtgcctggctcagggaatgctgagtgagcgcagattgcagcccgtgtgaggggctgctgcccgggccaggcatttctgtcttacttcatgtccctcacagcccatcctgtgctatatggaaggaagggattctttttttgtttgtttgtttgagacagggtctcactgtgttgcctaggctggagtatggtggcaccatcacggctcactgcagcctggacctcctgggctcaagtgttcctcccaccttagcctcctgagtggcttggattacagacacgggcaaccacacctggctaacttttgtatttttttgtagagacggggtttcaccgtgttgcccaagctggtcttgaactactgggctcaagggatccccccacctcagcctcccaagtagctgggactacagacacaggccaccacacccagctaaaggaagggattcttaatcacattttccacacaaggatgctgaggcagagagaggcaagtgcttggggatagtagaggcagaatgggaacctgagtctgtctcactctggagtctgtttccgccacttgaccgtgcttggctccccttcccctttgagggctcaccgtgtgccaggcgtcctcaactgcctcctctgaagtagtgagagctggcaggagcctcttatgactgttctgagatggtgggcaggtcaggtatggtggccccaggtcagtcttggagctagttaggcgttccctttaccagccttggaaggaagcccagaagtggctcaggaaggacttcccagtcagggcaggagtctccccagtaggctcccagacaggtgcacccagtctaggtgacaactcctaggttcatccttttgattttttttttttttttttttttttttgagacaatgtcttactctgtcatccaggctggagtgcagtggcacgatcttggctcactgcaacctccacctcctgggttcaagtgattctcctgccttagcctcccaagtagctgggactacaggtgcatgccaccacacccagctaattttttgtatttttattagagacggggttttaccatgttggtcaggctggtcttgaacccctgacctcaggtgatctgcccacctcggcctcccaaagtgctgggattataggtgtgagccactgtgcccagcttccctttggtattcttggtagtgccacagcaaagagctcaggtgagggcaggggtascccctcaggggggaagcccctttccaacaactgatgtgaaaaggctcctgggccctgctcgcccaatgcctgggccaaggactggccattggagaggagactgctggcccctgtgatggtgaccttgagccctgtggccctagcctgggacttgagagggctcagctgttgagccagagtccagagaycttacacggaaagcactttgagaccacagatgctccaggaagtgctactgagtagccatccccatacctgccagtcactcagacaatctaggtgtggagggaggggcttgggctccagagtctggaaggcccagaccaaagaggctcctggttcctgcggtccagcctcagtgggatggagccacatggagggtgatggtggaggggaagcacgggtgagtcagtacaggccaggttttgttgcagtgacaagtagcccacacctcagtggtcacagcacasaagcaccggtcccactcctggtctgtgctcgccaggctgggttctgcttttcagcccaggactcaggcwacaggaacagtctctagggaacactgacagactaaagcaggtggatgacttgaggccaggagttcaagaccagcctgaccaacatggtgaaaccccatctctactaaaacttagccaggcgtggtggtacatgcttatagtcccagctactcgggaggctgaggcaggagcattgcttgaacctgcgaggtggaggttgcagtgagccaagatcgcacctttgcactccagcctgggtgacagaacaagacttcatctcaaaaaataataaagacctttgcaagttctgttgcttgctcactgttgcaagggttttggagctattggctcgcccgaggccccttctgagctcaaatgccttcaggggaggtttttggcatcaagaggagagctctttccttctccagagaaacctcagatgaaagtgacaatatcctagaccctgcattgtgaaatggggcttgaattttagttctgaatttttattttgaagattatggaataaaaagcaaacagactggtcaaaaattatgaaaggagtgatagaattctcattgagatccgggtgcggcggctcatgcctgtaatcccagcactttgggaggccgaagagggtggatcacgaggtctggagatcagctaatacaaaaaattagccgggcgtggtggcgggcgcctgtagtcccagctacttgggaggctgaggcaggagaatggtgtgaacctgggaggcggagcttgcagtgagccaagattgtgccactgcactccagcctgggccacagagcgagacaccgtctcaaaaaaaaaaaaaaaagaattctcattgagaactaacacttcttagatagtgcgttttcctctaccagacactgttgcatgccttgtagggtttgctcttcctggcagcgttgtgaagtagatggaactgtgcttatttgaaggctgggacagaagagattccaggatgttaagtgaattgcctggggatggtgctgggacagacaggtcacatgtccacatctagcagctgtgggtctctttgtggtcaccctcccagtttggccctgtgaatggtcagatctgtaaaggcggatttctgggacattgctcngctgaaacctccttccttccccaggctctacggtttctccagaagaattcctctaagtttcatttcagacgcaccaggatgttgccggttagtggcgcattccacacccgcctcatggagccagccgtggagcccctgacgcaagctttaaaggcagtcgacattaagaagcctctggtttctgtctactccaacgtccacgsgcatagatacaggcatcccgggcacatccacaagctgctggcccagcagctggtctccccagtgaagtgggagcagacgatgcatgccatatacgaaaggaaaaagggcagggggttcccccaaactttcgaagtaggccctggcaggcagctgggagccatcctgaagagctgtaacatgcaggcctggaagtcctacagcgccgtggatgtgctgcasaccctcgaacatgtggacctggaccctcaggakcccccgagatgactgcagggggctcaaatgcratgamcccctctgtcctcctgaggagaggctgtaggctstgcctgtcgccccctaccttcctaatggctcctcctctgaggagtgaaagggatttgtttgcaacgtgctttgaaggccacataaaaagccctaaaaatgagtatttctttacatgacccagtccatttctyccccttggaaaaacgtttggacgttgggaagaatgatgccacagggctggtgtgtggggaagctrgaatcctggccccgcctctgccagccctgcaccataggcaggtgtgccatctcagcgggaaggggaggactggctgctgcagcctgtcctgctctgtgagtgctgagaacatgctggtgtggcctcaatttcagccagtgccaggggagcccctccaccacccccagcctgccccccagggctcctttgtcacaaatctgaaaggttttagaacccagttggccttggcagttttgttcacctcctcacttgacagctgggagacagaggcccacatttatggacatacccaagagatatgtattgcctgctgtgtgctagagagtgagtgcgctctgttctggtagaaaggtccttgagtgaggtgcggggtgtggggagtgccaggtagggagggcgactgaggccctggtcctaggggtggaaccatggaggaacaccctggtcacccactgggactgcgggtctgcggggcgccagagggagcacagcacatacctgcctcggagctgacccctggctccatgccccgtcctcagagmagctcctgcgycaatattaagtatgagacattycaagctgcttgggtggttgttcattatacagagatagtgggaaaatattattgggaatgaactctctgattgtcttaaaatgttaccattgtgtagacacgtcaagtcctggatagggttcctcattttcacatttttagttctctggtgtttctcagcagggcccagctggcctttgggcagaaccctccttccttatatgggaatgtcccactcttgggcagctgccctggtgccgggccattacacaccagcagcacttccaggcattgtgaccccagacaccctgcatgtctcgaagccctggctgaaaacacaaaagccgatgcgatgtgattcccactgcagcctgcatgcgcgtccctgggagtgcgacagttctttggaaagaactatgtcttaaatctgtattgcacagagaacttgattattttaagtactgagcatgtttgaagctccttccctgaaagcttcaagcaatggcagcctcaggagacccaggctctccacgtccaggttctcttgcagcgctgcaggaaggatggccacgttcagctctgaggaacaaaatcccaaataagggaggggtctgcctctccaggaggacagcagtaagggacagcaggccttaccacttgctctctctgcactacccttgtcctcatggcctggggcaagatccaagcccatgaaggggtaagagaaatcagctgggcatggcagtgcgcacctgtaatcccagctacttgagaggctgaggcaggagaatcgcttgaacctgggaggcggaggttgcagtgagctgagatcacaccactgcactccagcctgggtgacagagcgagactccattgtgaaaaaaaagtgttctccatggaacaacattctgtccagatcagggctcagcctgtctttgctgagcacatcctggcctggcctgatgcctttacatttcactcacaagcccgcccacctctggccaacaagagtggtctccagccaagcacggtggctcacacatgcaattgcagcactttgggaggctgaggcgggtggattacctgaagtcaggagttcaagaccagcctggccaacatggtgaaactacatctctactaaaaatacaaaaattggccaggcatggtggctcaggcctgcaaccccagcactttgggaggccgaggtgggcggatcacctgaggccaggagtcaagaccagcctggccaacatggcgaaacccacctctactaaacatacaaaattagccaggcttggtggcacatgcctgtgatcccagctactcaggaggctgaggcaggagaatcacttgaaccaggaggtggaggttgcagtgatccaagatcaagccactggactccaacctgggcaaccatcacaaaactcccatctcaaaataaaaatacaaacattagctgggcgtgatggtgcatgcctgtagtctcagctactcggaaggctgtcaggagaatcgcttgaacccacgaggcagagattgcagtgagccgagatcgcgccagtgcactccagcccggccgactccatctcaaaaacaaaaaacaaaaacaaacaaaaaaaaaacggtgtgtgaagtcaggcctcaaagctgcaaagggctgtgtgcagtggtgtgtgtgcctgcagacccagctatttgggaggctgaggtgggaggactgcttgagcccaggagttggtggccaacctgggcaacacaggaaagccaagtctcttaattaaaaaaaaaaaaaaaaaaaaaaaggctgcaaagggccagaccttggggagagaagacataaggaggcaggaaagcctattggaggtcccctttggtttggaggccaggatggagggaggagtgagcaggatgcagggtctgcccagccagcctgggaggtatgaacagctgcatctcccagctctggggatgaggggggttgggggctggagaatggtggccggcccagcccagctttgacatttggggtggagggcagacacagagccgatgtcctgggagggaggcctggtggggtctacaaatggcacgaggcaaggcccagggcaggtaccaagcctacaaaggtacaaagcagggtcctggccctcctgcccctggtgccccttgtcctgctccccaatccccaccacacctctccctgtgagcggagccacggctgcatccctgtggtgaggagtctgtgcagggagaggcaggcatcccctaaagaggaactgaaagcccaaaggaaataacccccaacagtggattttaggccacagaccgggacaagggagaaggcaaaccgtcgggccaaaccaaggcagcatttgcggtccccttttgcagggaaggatctgattaggagcacacaggccctgccctccccaccaacacagtgtgcctccctggggcgagaggaagcccgtgctggtgctgccaaccccccagagaggaccagagactgctggaaaccaacattttattgagcactcctgctcctcggaatctattccagtagattctttgccgagggcatcacatatcacacaggggtgtgaccagcactccccctgctacctgccgtgtgggcaggggcaggagtgaatggctcttcctgggcacaggccacagttaaccggtgacaattgcagagccataggaattcatcttttagaaaaaacgaaaactggaataaaaaaaaaacaaaaaacctgagtataaaacctcagcagtgttccagcactatctcggggtttaaatataaaaaggcatcatgagaaaacagttaaaaagataacagcagcaggccgccacctccagggcagtggtcatgggggtggggccagccmcgccctgagccgccggggcctcacttgagcagcaggtgcaggcccccgctgagcagcggcagcagcagcgccagcagcrgcagcagcgccagcagcacctgttcgcaggacacctgtgggagcaaagcagaggagtcaggctcggggcaggccccagcaatggggccagacgggtgacagcggagtgccaaggggaagcccaggagggtggggactgggaaggagctcgaggggaccagagaaggaaggagttcaggagagggggaaagtggccctgaggacgtggccagagaggccagcgtggcctgggcctgccagtctgcgggacacaggcaaagacacccggtgggcacaggtgagggcagtcagctgcccttgtggtgggcggtgccgagtggacaccatgggaccaggctaccaggaaggctgctcagggaggcccctgccctggccaggagacgggagtcctgcctgccaggtgaaggctctcggaccagagggagacccaggaccatgcactggtttgtgcactcagaaccaggcatctcaaacccaaaagcccatgggatcaggcagatgtggacacaggtgacacagatgatgatacggagtggtggggactgtggcgccccaaggagcggctctgacagcccccactggccgcagcgcaagtcagggtcagggatctcaaggctcttacccaggacccggggttcggggatctccagaacctcattatgttctccttaagtgtggtgaaaccgtccatgaaacttctaagaacatccctgatgtcctcagtctggtcgtagatgaaagccagacccaggctatagacaaagaggatggggggacaaagccattactgcaggagcaggtaggggcagcctgtacttagatgacaccatcacagctgtggggagcaggggcctgtgccctcccaccccacagccacccggggccctttccgtgggcgcctccacctgcaggggccgcgtggtatggactgtttgtggtcaaattcattccaacttcctgcttcctccgccagccagccgcccgccagcccaccgggtgtttggccctgtcttccagagctggccacgtggaaaataaacccccattctacagggccctcacaagccactgcccactctattcccccaccggagactcgctgagaggcccagcccccaggatctaggatccgagctcacgtagcaccccctcttaagaccacggtggaaatgtaccatctgggctcaatgaggacggcgagagagaaaagggccctgggctctgctttgttgcccaggaatgccagggacaggaggcagggggcgagtgccaggagctgggggctcccaggagaggtgygggaagcagccaagggtttcagtatagccccagagtgtcaaggcacatcccccacagagcttcctcagggcccagccctgtgctgtgttcagggcctccacccaccgcccagggcccctccccaggtgtagaggcatagggcataggccggctacctgtgcatggccacctcggagagctgggccaggcgyggggccctgaggctcacgtccatctcgtccccgatgcaggccagccgcagggccaatgcgtcactgcagggagcacacacaggagtcgggtgtggctgtgccgtggaggccacatgcacctggacccacccagccaacggattgtgtgcagctgggagtggcccagaggataagagatggtgtcagatttggggcaggcagtgagtgggcctccctgtatccctcctccggctcccacttggattcagagatacccatgaggtcccatccgtgggtggccccagaggtgcaagctatttcaaaaagaatcctggggcaggcccacctgtgggctttggtggaaatggtggacaaggggaacaggcaggtctgggggtgctgagcccccggatggctgaggctgaccaaggggaatggacaggtctggtggtgctgagtcccccggatggctgagcccccttgagcccccttcccacaggggttgcagcttaccttcctttgtgggaggtgagggggctctaagacctgtgtcctggtcccaatcctgaaaccagccctgctggcaccacccctctccgaatggggggactaagaagcccctagtaggccccccactaaaccacatccttgatcctacaccccacccgcattcactcccacacaaagactaagacactccccaccctcccagcttgctggtctgggcctctaccagggacctgtgtgcattccatcccagtgactacaccgggggaactcccagggaagtgggactcctaggggccctgagctgaggccggccctgggccctggccccacccacctgacctgccaatgccctgggcctacactccctacttggaggggatgcgggtgggaggggtacaggtgtgggctggcaatcagggttgggggctgtggtcctaccttctgttaccctgggaaacctcaggaaaatactgccccaggcttcatgtcctccaaccttgtccattaatggacaggtgcctccagttctaaaatccttaatgactaaaaatcctgaggctgaaaaaaaaaatcctgagcagaaaagaatcctgtggaacatggagctggtccctggcctgtgggaggtgccacatcagagacaggattccccagcagaaagcaacagcccaggtcaggcctgaccattctcttccaggctcagggtagaaactactgaggtcagctgctcctgggccttcacgttcctcatctgtaccaggggaagaatgaaagtgccagtcctggccgggtgtggtggctcacgcctgtaatcccagcactttttgggaggccgaggcaggcagatcacgaggtcaggagatcgagaccatcctggctaacatgatgaaaccctgtctctactgaaaatacaaaaaattagccaggtgtggtggcaggcgcctgtagtcccagctactcaggaggctgaggcaggagaatggcgtaaaccagggaggtggagcttgtggtgagcagagatcatgccactgtactccagcctgggcgacacagcgagactccgtctcaaa

SEQ ID NO: 96113 - DNA, 17449 bp, Homo sapiens
gttgatcggcatctgttacatgcgcccccaagatgacccccaatgtcctagtttcatatctggtaggaaggcttggatcaccagaggatccaaggagtcagtgcggaaggggctggactcaaatttccttctagaatagaaaacctgcaggccctgcttatccaccagtgggcgccatggcccataaagacccttccccatcccccatttcccttttccctccattttccgtttctctgttgcctggcaacgcagcaatcaaggactttgccgtcgcctagcaaccgtctcctgggaacacagagctgaggtaggaggggtgctctgatgaaatctgaacagacctccatcttaggaaaattgagacgtcagacttcccaacccccggattctcctttccaaagacccccgcgccctgaagttacttggacaatagctcctcaaaccctgtctcctttacgcacggggggccacgccacgcccatcccaggtcagccccgccctcatttcggtcaggtaacccagccccaaggttcctcccctttccgaagkttgctgcctccctcgatagagtaagccagaccccacccacctgcccgggaggccacgcctccgtccacttcccgcccgttcgctccccctgcctcgcccacactgtccctccgccacgcccctgacggccaatgaatgaggccgtcggmcacactgccccgcccccggcatctcggctttgcccaataaggaccacccggagggtttaamcgcttcgctcctggggctctggcaaatarcctcagtctttcccccactgtatccccacccccacttgttctgctccgccttccgccaccctcgcccggccctccagtccgccacgcagcttcagtcgtcgccggttaccatggcaacggcggcagcagcgcggggaaagggggagggacgggggcggagtgggagaaagagatgctcagagacgagagattctggcagagataaaggcaccaagaaagacaaagtgatcgctgtagagtggagtttgcacacaacacagggcctagcacgcagtaggctttcaataaatgttccttaaattactgcggcaggagtctaaatataggcaatgaaagatggaagactcaggcagagctggggagctcaacgaccgcaaagcctgagcactccctrccccatccagcatttggggaagcaggagccatgtgccccctgcaggctcctcttgggctaccctccgctggctgccctggatagagatgaaccacaactcccaacagcgccatgggcagcaaccctctaacattgagggatctggtgcctcggggccttatgggagttggagtccccaccataccgaggctgacaagttttccagccaaggaatgtggcaagcctgggtctccacgcctctgtaaaccccaaatgcatgatctgctctgtaagcctccttccttcagggatgctcaaccctgggctccatggaagaagtaggagtctggagtgggtaatgaataaggccacccacccacccagaatagctgcctgctggcaagcccctcaccctcgctcccatttgtgtgttcacgtgttggaagcagagcccacacattccagcgggctttctatttacacctggaatgcaggggaccacagccatggagcctaaggccaagtgacaggcctaagggcaggagacagcgggagcagaggaaaccaggccagagaaactgaggcataaaaatccaccgaaactacaggggatgtggggaagaggcagcctgggagaaagcccgaaacccacagaatgaaggacaagaaagtcgccctggtggagagagggtgggggctccagatmtaaaggtcctcagcccccaatctcttccaaccatcctcacacgtgcacaatgcatgtgtacacacatgtgtgagtttgtggcagggaacatgtgtgtcctcagctccctcccatgaaaagctgcagttcccactaaatataaccccctccccagcctgtgactcacccggaccccgcctcccccggcccccacttcctgtcccaccccccagcccccagctgcctgccacccgcccaagcctccctccacacaccaggcatccagctctccagtcccagagtctccaaggagagcctaggtatctgcatcccaccaggagctcgcctgtgctccatccgagatctcctgcctttgccaggctccaaccagagggacactcttgcacagatccccatcgctgccagccctgccctcctcctacaccttttcaccccagtaacctcagtaacttcggtcataagccctcagggacccttaaatccaggtgtcctcccccaccttgatcccaagcgtcaggggtatctggaacagtccccacatctgctcttctccctctctcttgatcagggctagatacagtgtgggaggagatggggatattgggcacctgcctttgggccacccccaaattgtgcaccacccacccggtccccctcctcaaatcccctctctccctaagcctctcatcctcctcctcaggggctggcaagctcggctgctgcaatcttctgcctcctatgggagtacccccaaatccttgcctcacctggtccattccctcaggtgatmccatgccagggccccagccctctgacaacttccaactacctccattctatatgactgaaccctaaattaacagttccctcaaattgagagagcatccctaaatgcagccaccacgagatgcttgttctagagtctgaaggcccaccccttccctgccagctgacacccccagatcagtcaggcactcacaaccaataacctttaccccatgccaggagccccccaaaactggacaaggcccttggaagccagcttttccctggggaggaaagaggaaccccccaacatagcccaccttcccacatacaccagcaggactcccttatgagccaggcttctccttaaataagtctccctcaaacagcgctgatgaacccccaaacccgccaggccccccgaaccatggaatatcctaaattttccatatccctacaggtacaaagggatcactccagggggcacctgtggccaaatcctgcattttctcagatgtgaaccccaaaactaaattaagacccccaaatacatcttacttctgatgctgccactccaggggcgccagtcccagataaggcctactaacccctccccacaaactcataccctccccccagtttatagyccccccatcatgcttaccttggttgtcactatacagagacagtccatgttggggggcctggccgcggcggcgggtaaggggctctgacttcatcggagtttcgttcctcccctccgtgggttctcacccctcccccctccgcaccccacttttgcagggggggccaggatggggggaggggtgagaggggaaggagggggttggagaagggaaggggaggggagcgtgggagggaggggaagggggccctaaaaggggctccccagtggaggggagggggcttggggagcacaccccgattctcaggaggggcgggggcaccgggggctggcagccccggagttcgggggctggggcatgagctggggtgggggaggggaactggatttcggggagccccsgggtaggggggggtcttgccaaacggccaggggctaggggccgtggcgggggagtggggtgggggggttggaaacggcagcggccgagggagccgtggagccgaagagggaaggggagagaggaggagagaggaagcagggggagggagggagggagctaggagccagaatggggggggtgccttggcagagttaactccttctgtgctggcaggaacccggataatgggaaaggagatagaagcagaagcacagaggcccctgaggcaaacatggagacctggccagccaccagcgatgacagcaaagacgatgaggctggatttcatttcttagagaaggaagcatctatagttgggctgggagcacccacggttatttgaatacgggagggaggcctctcggcaggcggtagggggtcgggtgtgagggaggagctgaaggaggcaatccctgggggcctagttctccctcaggtttctcagggggaaacctaaaaagttaagccctagactctttagtgcctgaaactggggcagccaaagaaaacgaggaagaaagggagagtgggtacaggaccacagagagtgcattctcggtgccccaagtccctgggccactgactcaggcttttgtcagcagggcccccaagattccaggtaatattagtgatatttggctcacccctccagccctgcctgcccctcaggaagttaggygctcgcccccacctccttacctgactctctgagagggaagccwcataatagtccaggatgtctgtcacaggaacagaactgagttacctccccaccccaggcctctccaggcacatcacccctgtcatcaccgctgctggctggctggcaagggaggagccctttcagccaaggctggtccacactcatggaggacaccataggcaggaccctgcatggtgctccagcttggaccaaatgatctctgggctcccaaacagcccccgaagttcagtaatggcccttggaggcccaggtccctcagaaaacgggctactcacccagcaaggcctggaagaggtcgctatgcagcactgtgaggagtgggggtgcccaccgcagcagtgggggtgccaggagccagagggctgacctgggagctagtgagatgcaaggagaattgggacagggaagatgccaacacaggaagatgaacacactgtcacttcatctccccagactgtgcccttcaccccagcccctacggaaagatttggggagaaggatctccgagccccagccccccacttcgctcccagacctcccctccacaaggagccctgtttttcacctcttggtctctgggacatctctctcttctctcactttaatctccctaatcctccaggattggagttgagctgcttctccccactaaattccagctgtgagtaaagtaggccgtctctgagccgaccagctgtcccattcccccaggtcccaaggcaccagcaccgccaccatcttgctccacacaccctggccccctcttcccataggcaggcagaacctagccacrctctcctgagaagccagcaaagagggcctcctcacagagggctccagcagctcaaaaagaagctgagcccagctctctctcctcctgggcctcctctcaccccaatgagaattgcagaaaaaggggtagaaattgtttgggacttcctgccctagggctagagaagttggggttttacgggtaagaggcaggagaattcctgcagttcctctcaggcccgggaggaatccatctgcctgggcacatagtctctggaaggaacagagggcaaagacagaagggaatgttcaggaaggtctcagaggctttactaagggaggggcagtgaatctgggggggtcttcctactgtgaaactgtagctgttccaagagttagtgaatggcctacatctcagaagaatacacttagggtactcacaccctagcttgggtgccccccaccactgtaccctcccttttgtgttggccgagatagatttcatcaggaaccctagagtctgtctttccatgtctctgcctctgccatctaccttacacttctctttccctacttttcccttctaaccccaccggagaagccctcccttcagtccacctccatccctctggctgcagtgacttaagccccttcctcttctgtcccatcctatcccatcaccccgtcggaggactagactctaggtcggacgggcgggattaaggagtttgggggagacgagggacgcttggagatccctctaagtcagcggaacgcagggccgggctccagggaactacagctcccagcatgccccggggcccgcaaccgtccgccgcccggtgcactgtggacgatgagtcagggttaggggcgccaggacgtgygcgtgcaggacgccagagctgggtcagagctcgagccagcggcgcccggagagattcggagatgcaggcggctcggatggccgcgagcttggggcggcagctgctgaggytcgggggcggaaggtctgtgtgtgacaagagggacggtgggcagcggccctgggcaccgggccggcactgaacccccactccccacagctmgcrgctcacggcgctcctggggcagccccggcccggccctgcccggcggccctatgccggggrtgccgctcaggtaagtcaccgcagccttggcaagggggtgtgggagcggcggtccssttcggcgcccgccatcggcagggatctccctcttggtgccaggtacctgcctactgctcagtcgccgaaagtaggggaaagggcaagccagggtgccctaggssgaaactaggggaaaggtcaccgcttcgssccgcctccccgcgcggctctcgcctgttctccccttgacacagcggaagtcccttccctgaacttgytaaccgtctcttttcccagctggctctggacaagtcagattcccacccctctgacgctctgaccagraaaaaacyggccaaggcggtaggtagccccgaggccaggtggaccttagccagacccaaccagagccctgaaatttgcctctctcygcccaggaatctaagtcctttgctgtgggaatgttcaaaggccagctcaccacagatcaggtgttcycatacccgtccggtaagggaagggataatcagagctgggtggggccagggtggtttcccctgccagcctggcctgaccagcctgtcccccaccctctgcagtgctcaacgaagagcagacacagtttcttaaagagctggtggagcctgtgtcccgtttcttcgaggtaaggaatgactcggggcttggtccctggtgaggtgtttggagatgttaagctcaaaaggagcctggatgtgggatcctgtgccttccccaggaagtgaacgatcccgccaagaatgacgctctggagatggtggaggagaccacttrgcagggcctcaaggagctgggggcctttggtctgyaagtgcccagtgagctgggtggtgtgggcctttgcaacamccrggtgagggcgccctatcgccacatcccagtatgccataccccagcttggcagactcagctcttttgccatagacctagagactagggctaaggtctcttctaagcacctgccctgggtgcctgtgggatggatgttaactgtccaaacataacacaatttacatgcagtcccctaggcctgagccatgggcctcaccctggttcccaagtccttacaaatctctaagttggggattgcctaacaatagactgactagtagcaagtcaccctcctacctagacctaagacagaccagcattctctgctgtgccctttgcacaccccacttcttttctacacactggggatggcccaggtcaggcactgccctaggtcaggaactgccctaggtcaggaactgccctgttgcccacactctcctgttaaggtcaggtccccctgcagccagtgacaaccccagattcctgcttcccctccagtacgcccgtttggtggagatcgtgggcatgcatgaccttggcrtgggcattaccctgggggcccatcagagcatcrgtttcaaaggcatcctgctctttggcacaaaggcccagaaagaaaaatacctccccaagctggcatctggtgaggcaaccctaggagagccagggattggggggcacactgggcttggcacagattaggccagttggcacttagattatcagatggctgagcatttcagttgggggaaggttttggggaggcatcacagtgtgctggttgggacatgcaaaagaactggatactcccaggtgttaagggggaactgcctgctggagggatggggaagtgggccgaggggactttgaagctcatcagaacttggggtaaagtagctctctccccaacaggggagactgtggccsctttctgtctaaccgagccctcaagcgggtcagatgcagcctccatcygaacctctgctgwgcccagcccctgtggaaaatactataccctcaatggaagcvmgctttggatcaggcaacctgcctcccatttctccccttctcctccgcccaattccaggccccactgctccccgtcctccacgccctgaatatcccattcttccacagtaatgggggcctagcagacatcttcacggtctttgccaagacaccagttacagatccagccacaggagccgtgaaggagaagatcacagcttttgtggtggagaggggcttcggggrcattacccagtgagtgaatttgggttgggggagcttaggactgaggggcaggactgggctcctgggcagatggctgttgcaagtcaccctggggacgtgtgcaaaagccaaagcaggtggactgaatgtggcctttgggactaatatgtatgcaactgagctaaagttttggctccagcaaccaagtccaacacaaaataggacatagccaggcctccttagccctcagggcctgaggggaagtggtggctgtagcctctaatagtctagtggtcgtcattcctccctggtgcataaggagcgaaggagcagtttttcccccagtgacaacctgttgaacacacctctgctttcccacactgccctgacacagtgrgccccctgagaagaakatgggcatcaaggcttcaaacacagcagaggtgttctttgatggagtacgggygcyatcggagaacgtgctgggtgaggttgggagtggcttcaaggttgccatgcacatcctcaacaatggaaggtttggcatggctgcrgccctggcaggtaccatgagaggcatcattgctaagkcggtgagtaccctgcccgagtccctaggtaacccaaacagaagtctcactgtcccccttgccatgtgtccctgatcacttgcaggcactccctacactagaaactcctcccctaccagcagcccgacttgctagcttaggtctccatccagcgtagactgaactctggttgtatgcaaaacccatccctctggcgcaagcccagcccctctcctagggagactgcagaaccacactgaaccacagcgggatgtgtggaccctcttccaggtagatcatgccactaatyrtacccagtttggggagaaaattcacaactttgggctgatccaggagaagctggcacggatggttatgctgcagtatgtaactgaggtgagggcctcccaagcccctctccctggagccctggggctttcttcccagtcgggtcagactacaacccccagcagcacctggggcagtgggtctccagctttacaccaatgccctaggggatgcggggaggcatagtcagctcagcttctgcgaagagagacagcaatgatgttctgctcaggtgcctgccagcagtaccagaagttaattctacctcatcccttacatccaccccttttaagaaaacaaatacctggaagcacctgatgaactgacccagaacaagtatctgcctgacctgacaagctaggtcagcccttatcttggagatctgggtgatgaggccaagtctgacaaagccctttgcaattttccttcccatgtcccaactatgcaacctcagtccatggcttamatggtgagtgctaacatggaccagggagccacggacttccagatagaggccgccatcagcaaaatctttggctcggtgaggtcccaggcatgctgggagggagtccagtttgggtgctcagctcccaaaaccagtctcatctgttctttgtccctaggaggcagcctrgaargtgacagatgaatgcatccaaatcatggggggtatggrcttcatgaaggtacaggacggtcttctgcagagcctcggctgggccaggggtgggtaggcacatctcagcacgggcatataatttgtgtggccctgtgctaggaacctggagtagagcrtgtgctccgagatcttcgcatcytcyggatctttgaggrgacaaatgacattcttcggctgtttgtggctctgcagggctrtatggtaagacagagaattgggtgggggtagaggtggggaggacagtgagtcctgactgctggaccctcttcccccataggacaaaggaaaggagctctctgggcttggcagtgctctaaagaatccctttgggaatgctggcctcctgctaggagaggcaggcaaacagctgaggcggtaggcttagggccagagccaggggagggcagggtggtgtatggcaactaaccagtcattctccctcttcctctcaggcgggcagggctgggcagcggcctgagtctcagcggacttgtccacccggagttgagtcggagtggcragctggtaagyggccaggggtccaggagagcctgcatcagggactgcagccgatggcccctctgagccccgcactgtccccatctcttaaggcagtacgggctctggagcagtttgccactgtggtggaggccaagctgataaaacacaagaaggggattgtcagtaagtgagctctacaccattccgcccctccctttcctctccttgagactaatgcccccacccccacccccaccccacctaccggacagatgaacagtttctgctgcagcggctggcagacggggccatcgacctctatgccatggtggtggttctctcgaggtgaggaggcaggcagggaatgcctgagccgcagggggcctgggcctggatcccagccggcccagatttattttcatctcctgcttcctgccagggcctcaagatccctgagtgagggccaccccacggcccagcatgagaaaatgctctgtgacacctggtgtatcgaggtgagactcggggctgccaagctcaggtgagggctggaggtgcaggcccaacccctccttccctctccccaggctgcagctyggatcyragagggcatggccgccctgcagtytgacccctggcagcaagagctctaccgcaacttcaaaagcatctccaaggccttggtggagcggggtggtgtggtcaccagcaacccacttggcttytgaatactcccggccagggcctgtcccagttatgtgccttccctcaagccaaagccgaagcccctttccttaaggccctggtttgtcccgaaggggcctagtgttcccagcactgtgcctgctctcaagagcacttactgcctcgcaaataataaaaatttctagccagtcatgctttgctcctgtgtgacggttctttccccctgctgcctgcctccctcccaaagaaaggagccagaggcgtggggagtttgcctctattgctttatttggkgttttatacaagtgactaaaataaatagagtaacaaaggyagctacatggcccaaatctcccagcttcctcaggctgctgtctaggatgcctaaccccggggtaccgctgaccacccccaaccctgcaaagggcagggctgtgggtaactggaggaggaggtcacattctggggttagaaggggcccaatggatgggaattcttcatataaaagaggaaatgcctattaaaaaagtcccaaaaatgtaagaaactctattttaacccccaaaaaggcttataaaaaaacaaagctaaaaataatcaaaggtcccttgtctacccctgagggaagggggaggaaccaggcactgctggtgagagtcacagtggccacaatctcctgtatggcagcagctggtaggctgagcccaggcactgtaagagcaagcacatgacggccaggacacccagtcacacaccaggagcgcccggcccagcctggccccacagtgggctacataacatccacaaagaactcgctgggattgcccatggccatgtggaagctttggcggctggctgtcagttctgggggcacagagcccaggtctctgactggaggggcccccggaggctgcactgctggagggactggaggtggaggtgggggcatcatgaccaccatcatggggttgtaggggagggccatgccagggggcggtccatagggatggagccctgggtgggctcggagattaggggcacccccagttgagcctctggatggaggagggcccccatcgctagtcycacttgcttccccaccccgccgaaggctgccccctcggctggagggctcagactcactgccactgccggacttggactcgggggcccgctcctcgggcctccccgtgcgccctgcccccccatcactccgtgtcgacccactgctccggctgcctgtggagggaggggaggggcaactgagtcctcacccaggctcctccctggctcccctctcatccaccctcagatcctggccgtacaggtatgtggggatgacttaccctcactatgctggctgctggcactgcccccaccataggtgtaagatgaaagctcatggtagggtggaggctgcgggctgtaggggtgtggggcagggtaytggtaggagaaagtgggcagcaggggccagggggtggccccaggcagaggagccagggtatcctggtctgaagccccactggagccatcgttgtcattgagagacaggttgactaggtctggaaagcaagggargagaggaagaaatcactgcttcaagaggctagggccccaagacaccgaatggagaggaactgggaacagttctcccagacccacccacgatggggctcaaaacaggggttcacaagggtctctgacaagaaactcccatctacttctgccatgagggcaggggcacagccactagcccacgtctttgcgggactcargtaagaggtgcaccttcccccggtggacacagtcctgcacctggcacatggcttgtccagcagcacatgggtggacgtcagcccccatcctcggccagtgcaggacctagtgcgggacacacactgctcgaccatccatggtggccctggctgcggtttctgggctaggtctagggttggagaggcagaacaaggtaggcaaagccacactcccagagttggggcagggggacttacagctctcacagccaccactgaggtctccgaagacgtaatagcactgctcagagaaggtgatcttgttgacggtgtgtcggatcaggcctgctttgagcagcccgctggcatacttgcgggcctcccgccgctcaggraagccctccacgtgatggtagagccagtcaaccacatccgagcctgggagcacccacagtggaaaaaggcctcaggttcttcttccaactcctgctctcgcctctgcctgtgccattcctggctttggtcaccacctcctccccttctccagccacctgcccaggacccagccatacccagaaaggcattagggatggtgatcttgagccacatgcggtcccggacttccagtccagactctggagctgccatggccttggtcaccgatgccatgtccgtatggacggagagaccccggccttcacagcctggcagaggagacaacgggtaaccagagtcagggatcgctcccacaagggcaatggatcagaccactgcgggacagccttctgctgggagggtgggatgaggtgggctggcggctcaccatcaggcaaagacgatccagatgtaatggtgctcatggaggaggaacctggataggctgggaaggtgccagtcagagccgcggaatgggacacccaggcagcagggtcaattggctggatgggctcatctgggacaaagatggcaccaaaatgacccattctcagtccccaaaagccagcccagtccctccctgactcagcctcctgttccacctctgcctggaccctcctcccacccattccccatgaccacaggcccggccccagcctcctgggcagcccccacccccaacttcaggcccctccctgagtgtcactcacttcgggggagagtgaaataggcctgaggagagggatcccagcacttggccacagtcagcacaatggggctatggggaagagaagtccagtcaagggcgcaggggaagaggaggcctcaggagggcgggggtctgaagcaaggatggattaagagacacaaagagggggagaagcaagcacatcgcggctgggctagagaaggtgagggtggaaggcaccacaatgtggatgactcatcaacatggaaaactcttaaaaacatactgccaagtgagacaagagagtacacgctgtacagttccattcacagaaagtccaaaaacaggtaaaacgaaactgcagtgttcaaggatacgtgcaagggtggtaactatccagtgaggcaaagcttttctttgttatggtgatggccaaagaagtcaggagagtgactacccctggggcagtgaggcatttgggagcaggaagggacatctgaggaggaagttctagggtatcagcaatctcctatttgatgatctagatggcagtgacatggatatttactctagtattatttgctatgtcatgcatttgtttcatgtactttgaacgttatgtcttagcacttttttttttttttgagacggagtcttgctctgtcgcccaggctggagtgcagtggcgtgatctcgtttcactgcaacctccaccccccagggttcaagtgattctcctgtctcagccacctcactagctgggactacaggcatgtgccaccatgcccacttaatttttctatttttagtagagacacggtttcaccacattggtcaggctggtctcgaactcctcacctcaggtgatccacccatctgggcctcccaaagtgctgggtttacaggctcgagccaccacgcccggctgtcttagtacttattaaaattccaaaacaaaacatgaaagagaaaaaaaaagaggactgaggaccggcaacctgcttggcaactcacccaggcttgtgcacaatgtccctcagcacccgcacagcgtcatcgttgctcatgttctcaaagttcatgtcattcacctggaagcgacggcaagtgggtcagagacacggtgggagaggctgagggcccccgtgcagggcagctcagtggccctaccccagcacacctgcaaaagcatgtcccctggctcaatgcgcccgtcggccgccacagccccacccttcatgatggagccaatgtagatgcctccgtctccccgctcattgctytggccaacaatggagatacccargaagttgtacttctctgtggagagaggccatgtgaaaagaggagcccctgccacaggacgcccggaaccctagagaccaggccctccccacgccctagccacaggctctccccatacccatgtttagcgtgactgtgatgatattgagagacattgtggaatctgtgacgctgctgaaggatgacgtctgtggtgggaaaaggagccagagtgcccttcaataacccagggtcaaccctggggtgctgccggtgtcctggcaccgcccaaaccaaagcccatgccccaccttctcccagcaccagccttcctgtaggaacccctcaccctctccaggcggggtggcctctgcttccttcgccgccggtggcgcttaaggaggcgggaggcactgctctgctccgtggagctgctgaacctaccaggaggttgggaaggagagcaaacgtaggccaaagtggtcatggggccaagagaaagaacaagaggattgactggaagacgagacggggctgggtgcgctggggagagctgtgcggagccacacctgctcatggtgtcctcctcgtccgagtcccccagrctggtactctccagctcgctggtcatgagggtagaggagctctcgtatccggccaggtggcgctccagccttgaggggccaccagtcctgtggcccccagctacatatggacaggaagctcaagaaccaagcttccccctgctcaccccaccaaggctggggtctggcccagcccttcccggcccccaggcctgcccctcaccgccatgctcactgctgtctctcctgcgaggccgctcccgcctcagtgacactactgactcggtttctgtctcaggctccagattctcatggctgctggacacattagggctggacaggcagagatggtttccaacccacatcaggagaacagggctccggatcctaggcgtcccctaccaaaggcctgggttccctcctcacctccctcccctgcagtcaagaatctgaaggactcactggaargatggaggccttgagtccccaatgccgctggtcctctcgggtggcaaaggaggtaaaggtggggctggaggcgccagttctgcccgaggctcatggactggaggggccatctcgggttggggattatctgaggacaccagctagaagggtgcaaatgataaacagtggctcacttgggagtcagggtgtgacaggtggcagtaagtgaaagaatgagaaagggtctcagagagctggagaagagcaaaaaaacctagcaagtattagagactccagaaggagaaggctgagggcctctcgccggctctccaaacagacaggaggtaaagagccagggctgctaacgcgcggcctggggaggatacagaaacagactgaggcttgagggagcttggcaatgctgagggggcctggtcctcggtgtcagaacctcttacccaggataccacccttccgttgaagcaggggaggcgggcgttgtcatctgaaatttcttccttcaccaccctgccaagcgacaaggtagaggtcagtgagctggaccaaccatccccaccccgacccccatcaaactttctcccaatcttcacctggctccaggatgttgactttctcctgccctgttcaggtcttctcttacattgaaagaactcactccgacacctaagaaatctccaaactcaatcccctttccttatttctcctctccctaacgcaccctcaggggcacagtgctgctccaaagacttccttgagtctgactcaaacctcttagtccagtttcaaaagcaatcccgcacgctgatgcggctgcctgagatacctatctaatgagactggctggtggcctcctctcaaccccacccctgttccttacaaaccttccaaaaaggtcaggcacggtggctcacacctgtaatcccagcactttgggaggctgaggcgggcggatcacctgaggtcaggagttcaagacc

SEQ ID NO: 96114 - DNA, 42233 bp, Homo sapiens
  misc_feature (1)...(42233): n = A,T,C or G
tgatctttgggatctgagttctagacgcgcagcccccatgcaacgcgctcatcacagacacgcaaacccatccatcgccctcttcaccactggaccacacctcagcagggccacagaaatgggacccagacgtgacgccttctgactcaaaggcccacaaccgccccctccaaaagggcacatacactgcatcctggcaccctccgcaacacatacagcatgccagctctgcagaaaacagttcataaacaggtcataggtgcagcacaagacacacatgcgagaaaacacatgctgtagaaaacatacagccccacatcgaacaaactctgcacccagcatgctgtgccctgctcagaatacccatctgtcacccaaagccacagggctcgtcttgtaactctgccccacaacactggacacccttcctggctttctatctccatggcccagggagggccctacccagacccctggctgccagcaaacggtggtgcccaggagaggtttaccttgccccaccacacagcacaagacacacgatctccaagactcacagccacaaccctgccccgacggcgcggcggttccggggccccagctcgccctgcgcaccccgcacaccccaactctggggcgctcggcggcccacccctccccctctctgcctggctcctacgccatcaccctcccagcagcttgcagcgcttgcccgggctcacacccgccccaccccacccccaatctgccccacggggggagggggccattaggctgcagaattaacccttcaaagagggagtgagcacctccccttccacggccccaggcgatcgcgtcccacggccgcccctcgctcggacgccataccagggcccccttagtcgccccccagcgtcgtgcgcgcccgggggcggggccaggctcagcccccgacccctgcgcccccaggtcaaccccaaaggagagcggtctgggcgcggggcgcggtcggggctcccgcagcgccgggcagcggagagggggcctggcagttggctccggtccgccctggccctgcccagttcgccccagggcccaccctgactgcgatggcgccgcgtccgccaggcccggctcatcaccgtggccgcccccggccgctccggttttgcccgcctccagctccggctccggctccagctccggccctggcccccccagcgccgggccccggcccggccccgctgccgccgccgccgccgccgctgacatcatcggctccccccgcccccggtcttacccccccacccccacccccggaaacagtccccccccagcgccgccgccgccgccgccgagaggaggccggcgcagcgcagccgacaccgacacaaagctccgagcgcccgacggccttccccaggactgacccccgcggcatgacactgcgccgcgctgggccaccgggcgggtggacaccgagcggggcgcgggccgggctgcagcatcccggcaggggcgcaagaccaccgacccccagggaaagggctccctccgcccttcctcctgcacgcccttcactcagcggtgcacactgcctgaaagcataacacacaggctctcagggtgcagacatgacatggcagactcataatcaggcccggtgggactcacagacccagggtcggcacactcaaagagggccagccctggacacacacacacaccctctccaggaatgcgcaggaaagctcagcaggccgcggaaaaagaaggccctggccctgcatacggggcacacacgaacgaccaccagcgcaaatgaacacatgaagctggctgggtactttgtccccaccagcagatagatccacatctgtatacttgaacataaatgcagaggccttggtgtcggcctctggggacagcatcaacaaaacaccaggtggaagcacacacagaaaaaacacattcctgaaactccacagggacaatcccaagaactcctccctggtgctggaaaattaaaaactaaggagatggaggagccagggttcacagctccttgccttaaaacctctctgaggctgggcgcggtggctcacgcctgtaatcccagcactttgggaggccgaggtgggcggatcacgaggtcaggagatcgagaccatcctggctaacacggtgaaaccctgtctctactaaaaatacaaaaaaattagccgggcgtggtggcgggcgcctgtggtcccagctactcgggaggctgaggcaggagaatggcgtgaacctgggaggcggagcttgcagtgagccgagatctcgccactgcactccagcctgggcgacagagacagactccgtctcaaaaaaacaacaacaacaaaaaaacctctctgaaaccatgcaagatataaataaacaaattaatgtaaagccacagagctagccataaaaagaataaaagaatcagacaaactttggagtcatggagacataaatagaaaagaagcagagttgggctgggcacggtggctcatgcctgtaattccaccactttgggaggcggggggtggtggggtggatacttgaggtaaggagttcaagaccagcatggccaacatggagaaaccccatctctacgaaaaataaaaaattagcggggtgtggtggcacatgcctgtaatcccaggtacttgggaggatgaggtaggagaattgcttgaacccaggaggtggaggttgcggtgagccgagattgcacgcaccactgcactccagcctgggcaagaagagcaaaactccgtcccaaaaaaaaaaaaaaaaaattagccaggtgtggtggcacattcttgtaatcccagctacttgggaggctgaggcaggagaatcgcttgaatctgggaggtggaggttgcagtgagatgagatcacaccattgcactccagcctggataacaagagtggaaacttcgtcgcaaacaaaaaaagaaagaaagaaagaaaagaagcagagttggactcagcgggaaaataggcgtgctaccacctcaggagagttccagggaagaaccccacccccactccaaccatgtcacaatggctggagctctgaggggcccaggctccctgagccaggaggagaggagaaagtccaaggaaagatggtgagtgtgggggccaggggcctagtactccctccctatagctcctggttgctccatttcccctcctttcctaaaacttagctgtctcagagatacccacaaatagaattcataatggtgtacccagatgtctctggaacctgtggcatcatacagatgcatagcatctgaggcttcctccccttcctcaatccgagagagcatcctgggtcctttttctcctcccaggaacaacttacccagggaaacgatgctccaggactgctcactccttgcttcctgctccaggcccacattataacatctcactcatcttttaggccctttctagctcccaagagttcctcagcaagatagcccaacactgtacagtcccacagggtcccagaccccatcctggcatctgccctgccccaggtcgcctgggctgcggctgctgtctaccctgagctcctttctccctaacaggctggcagtcacccctacttgaacccgcctgactccacacacccatcgccgccctccgctccacccagcctccgctggcaccagtgctgccagccctctgatgccaccaatggcctgctggtggccctgctgggtgggggcctgcctgctggcttcgtgggccccctttctcatatggcttaccaggcttccaacctgccctcgctggagctgctcatctgtcgatgcctcttccacctccctattgccctgctacttaaactgcgtggcgacccccttctgggacctcctgacatccgaggccgggcctacttctatgccctgctcaacgtcctcagcattggatgtgcctacagtgcggttcaggtggtgcccgctggcaacgctgccactgttcgcaaaggttcttccaccgtctgctccgccgtcctcaccctctgccttgagagccagggtctcagtggctacgactggtgtggactgttgggcagcatcctaggactaatcatcattgtgggacctggactctggacactacaggaggggatcacgggtgtctacaccrccctgggctatgggcaggctttcgtgggaggactggcgctgtccctggggcttctggtctatcgttctctgcactttccctcctgcctcccaacagtggccttcctatctggcttggtggggctgctgggctctgtgccaggcctctttgtgctgcagccccccgtgttgcccagtgatctcctgagttggagttgtgtgggggcagtggggatcctcgccttggtctccttcacatgtgtgagctatgcggtcaccaaggcccaccctgccctggtgtgcgctgtcctgcattccgaggtggtggtggcccttatactgcagtattatatgctccatgagactgtggcaccttctgacatcgtgggggcaggggttgtgctgggcagcattgccatcatcacagcccagaacctcagctgtgagagggaagggaaggtggaggagtgagatagaacttgggagcccgggggttgggagggacagggataaatagaggcaaagactgaagacaaacatgggaggagaagtgactggaaaagaactggtgtgggagaaggatacctctcagagtcaagggtgacttggggacttggtggagagggactacctggaagacctggggccagcctgggaccaagggatgtggagaccaggctgggtcctggaatcagggcataactaaggggtaaagtctgaggagcagatccaaacggctgaggcagggaggccgtgggccacggggaggacttcactcagcagcaaagagaagagcattggggctggagtgttccggcaaagacagagccagcagctgnnnnnnnnnnnnnnnnnnnncccctcccctcacggcaaaggtttcctttcctcgtgcttgtgccccccccttggggtggtgacgtgacattgacatcaaacaaggattactctgaatgtggcttgcagtggtgtcgtctctgctttggagggagagtggaaagtcctacgaccgttctcattggagaaccccttgggatccccgccccccattttattcctgaaatattctacaaagtggaggatttcctaatgttcagatgccttgaccccaaatcccccaggactttcgtggcccgccccatggctaatctgcttttctcggattgtcgcggtcccgtgatctctcccggacagtggccaccctccttccagagcaggcctcccagctgaagtctcttcgagaggctcaggccatggatctaggatcatggctcggtacagcgcggcattacaggccaggagatgcccacccgtctccgggggccgtttgacaaacatcggctacttccggacaagccactggtcctgccatcttggtttgttcatgcatattcagcaagagaactgcatattcatgagcaaccgcccttccccgggaggacccgccccgccccgccgccattaccgattcgcagagcagaccattttccagcttgggggaggctacgaatgagaggcttttgctgaagatgaaaccgttgtccaaactagaatgaaagcggcccaattttaccctcgagtcttcaaaccttaagcctcagtgcaaaagggagcagcgaggagaggcggtgggattaaagaaaaaaattcttctctccctgtcacttcaaaaggtcgcccaaccagcgagcggggggtttacccacgactctggctcgcaccccttgcgggcctgcgcaggaggccccgtagcgcaagggagggcgggaaaggaaggggcggggacgcgagggcgaatctataagaagcgtcgttcagcgagttcgctgctcagaagcgccgagagcgcgsccgggacggttggagaagaaggcggctcccggaagggggagagacaaactgccgtaacctctgccgttcaggaacccggttacttatttattcgttaccctttttcttcttcctcccccaaaaaccttttccttttcccttctttttttttcctttttgggagctgaaaaatttccggtaagggaaagaagggctcctttcgctccttatttccccgcctcyttccctcccccaccttcccctcctccggctttttcctcccaacycggggaggtccttcccggtggccgccctgacgaggtctgagcacctaggcggaggcggcgcaggctttttgtagtgaggtttgcgcctgcgcagcgcgcctgcctccgccatgcacgggggtggccccccctcgggggacagcgcatgcccgctgcgcaccatcaagagagtccagttcggagtcctgagtccggatgaactggtaagcggctctgtcctccccttcccccctcctcccctggsgggcggggccggacgggggctgcggaaacttggcgctttctcgctgcttatgggtgacgggccaggagcatggctcagcagcgccaaggccgtgtaggcgccagtctcgggcctcccagagttatattttgcaaagagttgagcaggcgtagcgctttgtccgagatggggggctggctggagggtgagaaggagggagagaaggatgactgatttcacactccagagttaccgacgttaaaggcgatccgacgaatcctagggagtcttcacaagtttggttaagaagccaaacccgggtagcttcctcctcttctgtaatacaaatgttaactgagcwyctgctctgttgaagacacaggagactcgggttacagaggtgaacacgacagaccaggaccctaccttcaagagcactgtctgtgggaaagggcaagcagtaaacatgaatacaatgaatgaatgagataattcagttaatggcatttgtctcgaatagagtgaaaaggggtaatcccatggagagtcactgagctggggctactttatttttttatttttattttattttattttttgagacggagtcttgctctgtcgcccaggctggagtgcaatggcacgatctcggctcactgcaatctccgcctcccgggttcaagcgattctcctgccttagcctcctgagtagctgggattacaggcatgcgccaccatgccccgctaatttttgtatttttagtagaggaggggttttgccatgttggccaggctggtctcgaacgcctgccctgaggtgattctcccccgtctttttttttttttttttttttttgagacggagtttcgctcttattccccaggccagagtgcaatggctgaactcctgacttcaggtgatccacccgcctcggcctctcaaagtgctgggattacaggcgtgagctaccgcgcccgtcgaggtggggctactttagatgggatggcgtcagggtctgggaaggcctrtcttagaagacattacccaaatgatgagaggcagccagtcgtcgaagccatagtttggatggcgagagcttttccggcagaggaaatagcaagtgcaaagggcctgagggagaaatgaacttgggcttgtcctacagggtgaaaggcggccggtgtggctgaggtttagtggatgagagaagagtgttacagaaataggctggagaagcatgggatattgtatattatggtaaggagtcaggacttaattccattttcagtaggtagtcgttgacaattataaacagagtgacagcacatttgaaaaaactactgctgtagttgctctatgaagaactgatgcgagaggaggagagaccagagagaggagggcagccctaggggagagctattggtgacttggactttttcccttgtggcgctaagtagaggagcccactggctggaaagaatggagttaagtggctgtttgtggatagagaccatttttgctgggagaaagttcagctatgtcaggagtcagaacgtcctgacctcacaccataccacagaatcagttccagatgaagttaagacttaaacctaaaaaaacccataaagcactagaaaaaaaatagaaggcttttgcagggctgataccagagacagaagtccttaatagtagtgaattaattataggcaaattttatggagtgcctaaaatgagctaaacgttatatataaggaagaccaaggcagatttcactacataaaaataagagccacttctgtttatagaggcactgtggcaaagctgaaaaacagatcaggaaacagtatttgcaattacgcagacaaggttaaatttattgatgtacaaggaacacaaatcagtaaggaaagtacctatctactagaaaaatgggtaaaggagatgaataggcagttcacagaaatagtgcaaatggccaacaaagagtagactttctaataaaaaaaatccagattaaaataaaattttttctcatctgattttttttccctgctggcaaaaatattgggaaatagacatgcttatacattgttggtagaaagatagattggtataacctttttggaggatggtctgacaattttttttttttcgagatggaatctcactcttgttgcccagactggagtgcagtggcacgatcttggcacactgcaacctccacctctcgggttcaagcgattctcctgccttagcctcccaagtagctgggattacaggcgtgtgccacgatgcctggctatttttgtattttagtagagatggggttttgccgtgttgcccaggctggtcttgaactcctgacctcagaggacccgcccgccttggcctcccaaagtgctgggattacaggcatgagccaccatgcccggcctctggtctaacaattttatcaaccttttaatatgtaartcatttgatcaagcattaccacttayaaaaattcatccttaggttaaaaaagcttaattatcccctcaatgatgcccctttcccagtcttgcatggttcattaaatagtttctccattcatccatttgctcaggcsaaaaatctaaaagccatctttgattctctttctcacaatctccacttagtccatctgccagagtgtcagtcctacctttcaaaatatgcctggaatccagccatttatgaccatctccaccaccatgtcccaccatatcccaccctactgtcatctttcctgtggggtgctatagagccctaattggtcttcctacagtttgtaagaacagctagaacaggctagagagatctcttcatcccttcccttcatagaatcctttccagaggtttcaggactccttactctgacctataaagtgctgttttatctggctcctgcttgcttctccatctcattactagtctcctctttgcttttcttgaaccacgctgactgcttgctcctctaacactgcaagcttattcccacctcaaggactttattattcactattcctcctgcttggaacaacgttgctcagacctctgctctgcatgcctgttcctttatgtctgtatgttctgtgttgaaatggcatatcttttttttttttttggacacagggtctccctctgtcccccaggctggagtgcagtggctcgatcacagctcactgcagcctcttgggctcaaaagatgctccctggccaggctcaatcacgtctgtaatcccagcactttgggaggccaaggtgggcagataacgaggtcaggagtttgagaccagcctggccaaartagtgaaactctgtctttactaaaaatacaaaaattagctaggtgtggtggcacgcctctgtagtcccagctactagggaagctgaggtaggagaatcastttaacctgggaggtggaggttgcattgagctgatactgtgccattgcactccagcctgcgtgacggagtgagactgtctcaaaaaaaaaaaaaaaaaggccaggcgcggtggctcacacctgtagtcccagcactttgggaggctgaggcgggcggatcacgaggtcaggagatcgagaccgtcctggctaacacggtgaaaccccgtctcccctaaaaatacaaaaaattagcagggcgtggtggcaggtgcctgtagtcccagctacctgggaggctgaggccggagaatgatgtgaacccgggaggtggagcttgcagtgagccgagattgcgcccctgcattccagcctgggcaacagagcgagactccgtctcaaaaaaaaaaaaaaaaatgctcccacctcagacagacccccaacccccacctcagtagctgggacaacaggctcttaccaccatgcctaatttttaaatttgttgtagagatgggttctcactatgttacctaggctggtgaactgggctcaagcgatccccctcctctgcctcccaaagtgctgggattccaggcatgagacactgcgcctggccgatgtcatatctttaggagcgcttccctgaccactctgtttaaatagcatcccccgcccttcccttsttttctctgatcattctctgctatattttccttcacagcctgtcactccagaaagaattagtttttctgtttcttgcttccttgctagagaatgaatttcatgagggactttgtctgtgttattcatgttcccttagtatctcaggtagtgcctggcacatgatagacatgtaataaaaattagttgaataaacaagtgaatgaaataattgggcaaatatgcatagataatgtagaaggacttttattgcaacattgtttgaaagtgacaattataaattactyggtatttactaataggaatcctgttgaataacttagggtgtattcttacaatgtaatagaggaacttcccaataaggtyscacactgtgctgatgccctgagacactgtggcacacggtgggcacagtgaggtattttaaatttccaagagaaacacaggtacatttgtcagataccctggaactcctagttcctggtagttctgtttcaacattagatggtgccaratccctttctataatgtcatatttttgtgaaactgggtttttagcagttgctaagtacaggcaaaaatcagtttgtagaagaaataaaggtggtgctgtttagtctgattccaaggtttgagaggtgcagtgcctaacaggcgccataagtgagtgagatggttatttggyaaagaaataaaaatgttattttgttttaatatattaatagtattttcaacttgtgtgtattttctcaaatggctagtaagttcctaggacataaatgcttaagttgtttgggtctaggtgcttaataaattgctgtcttttcttggaaagatggagtcttgctctgttgcctaggctggaatgcagaggtgagatctcagctcactgtaacctctgcctcctgggttcaagctactctcctccctcagcctctcaagcagctgggatcacaggcatccgccaccatgcccggcaatttttgtatttttggtagagacagggtttcaccacattggccagaccggtctcaaacttctgacctcaagtgatctgcccaccttggcctccccaagtgctgggattgcaggtgtgagccaccgcgctcggctgtggctctcttttgacctagtaagtgctgtgagagttactgaaatggtaagggcactgtgggctgttgataatgttagggaatctatggataaatgaaaaagttactcagaagtatgcaragtgaaggccttatgttaaagtgggaacgtatttacggtttttttaaagcatgaaaaaaaatgcatgccgtggctcatgcctgtaatcccagcacttttggagcctgaggcaggaggatcatttgaggccaggagttcaggaccagcctgggcaacacagcaagaccctatctcaatttaaaaataataataacaaatgggctgagcacggtggctcactcctgtaatcccagcacttcgggaggccaaggtgggcaaatccccgagggtcaagagttcaagaccatcctgtccagcctagtgaaaccccgtctgtactaaaaatataaaaagcagctgggtgtagtcatgggtgcctgtaatcccagctacttgggaggctgaggcatatgaaccacttgaatctggtaggcggaggttgtactgacccaagatggaataataacaaataaaagtatgggacactgttgacaaagctctaccagagtcatctctggggtgtaggattgttgggcttcgatagtgctctgcatgtcttgcagtttatacgatgtctgtattttgagggaccaacagacggttcaattttgggtagaaggatgggtgagggtgagtaaggtgcctcttgttgtgaaacaggtggtattttaggctaaaatgttttacagaagtcttaggggtcagagtgtatggaggtacggaggggtctttgaattggctttgagatagagctgttgtccttgctgttagaagatggatttagaygttgctaggtgaggggaaggttacaaggcgggttggtactagagctttgtaccagcgtgtgcacaaaattttggggaaagagggtgctggatttccttcgcagtagttgacccctattcattaaaaacaactgtctatcatggaatgcataacttatttataccctgacttatttaaataaggatttaaagcagtaatctgttctttttttttttgatacggactccagctctgttgcccaggctggagtatagtggcacagtctgtgctcactgcaacctctgcctcctggattcaagcgattcttctgcctcagcctcccgagtagcaggaactacaggagcacgccaccacacccagctaatttcttttttgtatttttagtagagacgggattttactgtgttgtccagactggtctcgaactcctgaccttgtgatccacccaccttggcctcgcaaagtgctgggattacaggcatgagccaccgcacctggcctagtttttgtatttttattagagacagggttttaccatgttggccaggctggtctcgaactcctgacctcaggtgatctgcctgcattggcgtcccaaagtgctgggattacaggcttgagccactgcgcctggtcaataatgtattcttttaggtagagtgtgggctacattgatgagtgagaagrtgatccttgttttcaagttacytataatcttgtgagggatttcctatgtatgcagcaaatagttactgagcctcaaccatatgttggttactgtgctaggtgctgaggatatgaagagaaaacatgacccttgccctcaaggattacagtccaatgagagagacagatgtgtcaccaagtaattaaaattgggctgagaaccttgctggggtgtgcataagactaggaagagttagagaagacttcataaggaggtgacctctgaactgggtcttaaagaataaatagaagtttactcccaagggggtgtgtgaagcaaaaggagatttgagaaatctattgtatttagaacataaatgtgggaggcgggtaggagaatgtggtaccaaataaagctgtaaaagcaacttgaagccaaattgtaataaggaccttgttagctttgctaaagcagaggaaagaggacgagtatttactgagattcaatgacagcccttttgttattgtggcctcaggggcagaacccaaagagaacccagcctgactggccaccccctcaagtgtttaacctttatcctgtaggcagtgagaaccattgttggccgaagggttgggggctaatttaaaatgacagtttgaggcctggtgcggtggctcacgactgtaatcccaacactttgggaggctaaggtgagtggatcacttgaggccaggagtttgagaccatcctggccaacatggtgaaaccctgtctctactaaaaatacaaaaattagccaagtgtggtgagcacctgtaattccagctacttgggaggctgaggcacaagaattacttgaacctgagaggcagaggtggcagtgagccgagattgtaccactgcactccagccggggtgacagcaagaccctgtctcaaaaaaaaaaaaagtaaaataaaataaaaaatgagagttcgtgaacttggtgatggagggatagctcttctcattaacaaggatatgcgtgtctgctgtctaggacaccccctgacccggtctcagaaagcctgaaagcagaattagtcattagaagggtggttggcttggtcggcatagactttgagcagaaagaggttgaaaatgttgagcctgatttctcttaggcccctctgcagtgtctgttgtggaggccagatacgtaactgcttccgctttttttggtgtcattcaaggtgagcaaatccccttcatgtttctcaccagacaatgcagctgatgaggttccagctttgcaaatgtagtcatccatgaggactgtctccctgagatttcatcaggtcatgttgatgagagttttgaacctgtctgaggctgagaggtktgcagaacttcttcagctttgcatctgtagaccattttggtttctacccagcagtggccaatcagacctattatgaggggattactggtttgactgtcagagggtaacctctctttttccaagttttttgagggtacctccctccagtggagagtcctaagcagtaggtcaatttaacagacatttgttaggagcccaccatgtttcaggcaggcacatgggattcaggatggttgaggcattctgcctgcctgagaggtgcttatagttatagggargacagacccccrtaggtcattttattgcattgttgtatgtgcagtgatagagggctgtggaagcacagaggaggggtgcctgtctactttgggcaggctgtggaaaggcttcctggaggaagcagtgcctgagccgagtcttgaaataggagttttgcagtgggaagagcattccwagcagagaggcactagcatatagaaaaccccggaggaacgcagcacgtgttgcgctggatgtgataggcgactccagggaattgttactgaggagtgaacaggaaggtgtggagcatcagggaaatgaaggttgagaacatcataaaatccttttgggaagctgtcctgctgagtttggatgtcagtctgaggacaagagggtatgaatgattacatttttaktttattattaatttttattttatttatttttagcacacgtttttattttagaatgagcaccccagttgtaatgtagaaggattggagagagacaggctggtgacccataggaacgctctgttgtagactacaaaggaagggcctgaactagggcaatggtggtggggatggagaagagaggcaagattcaagaaacacttaggaggccaggcgtggtggcttatgtgtgtaaacccagctgagattcccgccactgcactccagcctggatgacagagcaagacttcttaaaaaaaaaagggaggtaaaagtgaccagtacctggtgaatgactgaataataataatgtccattcataaagcgccaattacatcctggacttaagcaagctaattaagtccttaatggttacatagttcataagtaatataggcagaattccaaagcaagggtgcccgacagctaagtccatgttctttggactgttttgtgcttgaaggtaaggaaaggtaagcataggtttctgaatctgggatagagactaaaggaaaaagagaagcttttgtggaaaagagagtttgcttttaaacatgtttaatttgattttttggtgtgatgtttgcagggggttcagtaggtagtcacatacgtgaacccaaagtccagaagaaaagtaaggcctggaattagagagttgagaatgagtatccaagcataccttggagatactgtgagtttggttccagcccaccgcaatgaagcaagtcacatggagttttttggttgccattgtgcatgttacattagtactatgctgtagtctactaagtctaagtgtacaatagcattacaatttttttttttttttttttgagacggagtcttgctctgtcattcaggctgaagtgcagtggtgcgatctcagctcactgcaacctccgcctcctgggttcaagtgattctcctgcctcagcctcccgagtagctgggattacaggtacccatcaccacacccagctaatttttttgtatttttagtagagatggggtttcactatgttggccaggctggtctcaaactcctgacctcaggtgatccacccgtctcagcctcccaaagtgcagggattacgggtgtgagccaccgcacccggcccatctacttctgagttcttctgtttcctcctttccttcattgaaatgtccccatcaagtcctggctcttcctttcttgggattccagctattcacttttgcttcaaatcatttccaccaacctgtttttctagcacctgtttctccagtcttttaataaaatctctggcctggcgcggtggctcacgcctgtaatcccagtactttgggaggccgaggcgggtggaccatgaggtcaagagaccatcctggccaacctggtgaaaccctgtctctactaaaaatacaaaaattagctcgatgtggtggcgctcacctgtagtcccagctacttgggaggctgaggcaggagaatcrcttgaacccgggaggcagaggttgcagtgagctgcgattgcgccactgcactccagcctggcgacagagcgagactccatctcaaaacaaaacaaaaccaataataaratctccatctggacacgaaagggttcaagcagttcaggcctygagaaggagggcatgacaaagatgagggaaaagaaacagggctgcatctctgagtgcctcgtttcttatcaggggcttgagttggcggggcatgtcttggtgcagaacacctgggctgtcatggcgagggtacaggtacagagaggcttctgccaggatctcagattcatgagcttgatttctgcttgggaggaacaaataaagcattgttttgtttttttgtttttcctgaagcaactttgatttctttttgtggctaaatcctatggatgtcagagacctagaattcaacccagatggaagtctggggttcatgtcccagtagcaggtgatttgtatggaacccaggatcgaccattatctagtgtgagtgcttttcctgcctcagtgactggaataagcctctgacttgggatattcaactttggccttttcagaagtgtacacacaccaatcccccattcccctcactccaggctaaacttagttcttctgtaagtagttcagggttttcccagaccttagtccagagctccccagccacaaaggctagaaactaggaacgctgttcagttgttggcctttctttctttgcagaagcgaatgtctgtgacggagggtggcatcaaatacccagagacgactgagggaggccgccccaagcttggggggctgatggacccgaggcagggggtgattgagcggactggccgctgccaaacatgtgcaggtaagtgctggggggccaggtgggatcccaaaggggaggtgggttgggtcctcaaaactagggctgacggttgacacctggaggcctctgagatgagtgggagctgggaggaaagcactgggtgtgtgtcccacaggaaacatgacagagtgtcctggccactttggccacattgaactggccaagcctgtgtttcacgtgggcttcctggtgaagacaatgaaagttttgcgctgtgtctgcttcttctgctccaaactgcttgtggactctgtgagtggggaacaggctctggtctgggagcgggggtgcttggtagggggcagggggacagcttcaactgaccctgctctgccctgtccccagaacaacccaaagatcaaggatatcctggctaagtccaagggacagcccaagaagcggctcacacatgtctacgacctttgcaagggcaaaaacatatgcgagggtggrgaggagatggacaacaagttcggtgtggaacaacctgagggtgacgaggatctgaccaaagaaaaggtggctggggctggcggagacttttgggaaggaggggtcagaggcctggagggaggaaactggaagggaaggaaacaggaggggctggcctggtgtggagggaaatggyccaccctctgggctctgatggcccctgtctctccttggaagggccatggtggctgtgggcggtaccagcccaggatccggcgttctggcctagagytgtatgcggaatggaagcacgttaatgaggactctcaggagaagaagatcctgctgagtccagagcgagtgcatgagatcttcaaacgcatctcagatgaggagtgttttgtgctgggcatggagccccgctatgcacggccagagtggatgattgtcacagtgctgcctgtgcccccgctctccgtgcggcctgctgttgtgatgcagggctctgcccgtaaccaggtcagtggctccagggctctgcctcttagctggagggcgaggtgtctaaagggaggaagacctgtaggtggggatgggtggatsgacctgggtttgaaaattcccctgctacttactagctgtatgatctttaatgagtcctttcacatggttaaaggccacaaacgtgtttctgaatctataaatgatagtgggmagtcctgcctcctggggtggtgtgaggatgagagctgtgctgtgtgcctggtacgttcctgccgagcgctggcagtggtggctggaccatgatgattctgacttcctgcctcaggatgacctgactcacaaactggctgacatcgtgaagatcaacaatcagctgcggcgcaatgagcagaacggcgcagcggcccatgtcattgcagaggatgtgaagctcctccagttccatgtggccaccatggtggacaaygagctgcctggcttgccccgtgtgagtcagcatgctccccacccctctgtgtattggagccagggtgggggctagcatgaggcttcagagctctggaagagggcccagtgctgactttctggattgcccccaccctgtgttttttcctcacaggccatgcagaagtctgggcgtcccctcaagtccctgaagcagcggttgaagggcaaggaaggccgggtgcgagggaacctgatgggcaaaagagtggacttctcggcccgtactgtcatcacccccgaccccaacctctccattgaccaggttggcgtgccccgctccattgctgccaacatgacctttgcggagattgtcacccccttcaacattgacaggtgtgcctccgttggaaagcccttcctggaatggctagggaagacatggcctcagtggcaaggcttcgagagtctgctcctcctacctcgggcgtgggcttggagcaaggaggaattgaagttctgaagtttaacttccactcagggagggtggctgcaggggtattttaggaagcattgagttcattgcacctctttccttcctagacttcaagaactagtgcgcagggggaacagccagtacccaggcgccaagtacatcatccgagacaatggtgatcgcattgacttgcgtttccaccccaagcccagtgaccttcacctgcagaccggctataaggcacgtagcaggccagggcctctctcagccacctgagcagaawgctttccaagatagggcaggctgggttaggccatctgagtctgtctcgttcattgggatccagacttgactgtcttgttaaaggctgttgctgcccagatgtgcagggagctgttggyctctggcattcagggtgggggtggtataaacccggggcagcttgcatatggcagggaagagggatccgtggaggaacagtgcagaaggctttatgttcagaatctctcttgcttttcttctagactgagttccttgagattggtgaatgctgtgtattattcatccctgataacctggtgtttggcccagggccttgtccagaggagtgtttaataagtgtttcaagtgaattagcaccacgatgtcatctcttttcagtttacaaaggactttttttttttttttttttttttttaaagaagacagtctcgctctatcgcccaggctggagtgtagaatgcagtgctgtgatcttggctcactgcaacctctacctcccaggctcaagcgattcttctgcctcagcctcccgagtagctaggattacaggcgcgcgccaccacacccagcttatttttgtattttcagtagagatggggtttcaccatgttgaccaggctggtctcaaactcctgagcttaagtgacgtgcccgcctcagcctcccaaagtgcttggattataggtgtgagccactgcactggacttgcaaaggactttaggtccattgtccttttattcttagatacctccttcactgagaccttttccttacctcacctctctaggtggaacggcacatgtgtgatggggacattgttatcttcaaccggcagccaactctgcacaaaatgtccatgatggggcatcgggtccgcattctcccatggtctacctttcgcttgaatcttaggtcagtccctggctgagggaagcaggctggaattggtgggaggcgggcaggctgggtggctcctcaaggtttcrctgcagacatcttcccaaccctgacttttctctttaactgtagygtgacaactccgtacaatgcagactttgacggggatgagatgaacttgcacctgccacagtctctggagacgcgagcagagatccaggagctggccatggttcctcgcatgattgtcaccccccagagcaatcggcctgtcatgggtattgtgcaggacacactcacagcagtgcgcaaattcaccaagagagacgtcttcctggagcgggtgtgtggtccaaatggaaacctggcttaagtgggcagtggggctctggggtgcaaggtggaggctagagaggaagagctgtgttttttttcctgacttacccagcagtggtctgtgagattgtcttttctggtgggcgaacaaaaagggggttaggaaaactcaggccaaaaaggtgtaaggcgttaattccccatttaattccttaaaatttcatgtaataccaggtattgcctgtaaaggaaagataaagggaaaaataagtaagaccttgttaaaattttatttttctattttaaccttcacttatttcctaattattaaaagaaatttatgcttattgttaagaacaaaaacaaaaatttcagtattacaatgaatttttaattaaaagtttttggggccgggcgcagtggctcacgcctgtaatcccagcactttgggaggctgaggcgggtggatcacgaggtcaggagatcaagaccatcttggctaacacggtgaaaccccatctctactgaaaaatacaaaaaattagccgggcgtagtggcatgagcctgtagtcccagctacttgggaggctgaggcaggagaatggcgtgaactcgggaggcagagcttgcagtgagccgagatcacaccactgcactccagcctgggcgacagagcgagactccgtctcaaaaaaaaaaaaaaaaaagtttttgggactgggcatggtgactcacacctgtaattctagcactttgggaggccgaggcaggcacatcatttgaggccaggagttggagacaactctggccaacatagagaaaccccgtctctaccaaaaatacaaaaattagccggacatggtggcaggtgcctgtaatcccagctacttgagaggctgtggcaggagaattgcttgaccccaggaggcggaggttgcagtgagccctgattgcaccattgcactccagcctgggtaaacagcaagaccctgtctcaaaaaattaaaggttggaaaaaacttttcctgtcatctttgcctccaaaatctggctttctcccttgggcagggaaacctccccaacatttctctatcatccctgagatgtggggcctgcactctracttctgtctgccttmctctttgtcttacagggtgaagtgatgaacctcctgatgttcctgtcgacgtgggatgggaaggtcccacagccggccatcctaaagccccggcccctgtggacaggcaagcaaatcttctccctcatcatacctggtcacatcaattgtatccgtacccacagcacccatcccgatgatgaagacagtggcccttacaagcacatctctcctggggacaccaaggtagggcttggcttctggatatgtgaggacagaatttggacrtgggagccaggaccagagcaggggccttgagtgggtgctttgtccttaggtggtggtggagaatggggagctgatcatgggcatcctgtgtaagaagtctctgggcacgtcagctggctccctggtccacatctcctacctagagatgggtcatgacatcactcgcctcttctactccaacattcagactgtcattaacaactggctcctcatcgagggtgagcatggaggcgtggtaccaagacgtctctgtgaattctctaacttcttactgtccttccatccctttctttcctccttggatttggtgccccctgcttctactctcttggctataattccattccatgtttcttagaggtccaaaggggtttgctgatgtttttccctgtctctaggtcatactattggcattggggactccattgctgattctaagacttaccaggacattcagaacactattaagaaggccaagcaggacgtaatagaggtaagaggggaggccaccagagacggaataaggggtttccagggacttcgaagttagcatcatcaagagcaaagggagtgtaaggttagagggaaggggcagagagtagggattgatgtctcaccgagaactctgcctccaggtcatcgagaaggcacacaacaatgagctggagcccaccccagggaacactctgcggcagacgtttgagaatcaggtgaaccgcattcttaacgatgcccgagacaagactggctcctctgctcagaaatccctgtctgaatacaayaacttcaagtctatggtcgtgtccggagctaaaggttccaagattaacatctcccaggtgagaagccttgtttttccatatayggggccgctgtgaagtttgggaggaggaaggaaggtgtttgtatgtattagggtcaggagaatcacgggagttgggggaaattttgggaactgttattcttaaggcagagggaattcagtatacaccacctttctgtttcccaggtcattgctgtcgttggacagcagaacgtcgagggcaagcggattccatttggcttcaagcaccggactctgcctcacttcatcaaggatgactacgggcctgagagccgtggctttgtggagaactcctacctagccggcctcacacccactgagttctttttccacgccatggggggtcgtgaggggctcattgacacggctgtcaagactgctgagactggtgaggctttcctcaggggtcttccttgggctgttagcagggactgctgcaggctgagaaacccctaacaggtggggagcggaaatgctcaggctcctattcccagggtataattctggcccttgtggaaagaatagagtctcaagagtaggcaaacacccttgtttggattgctgtgcagcattgcacagtgcagggacagagcttccggggctctgccggcctgtcccatgggagtggttcctgctgggctttttgtccgtctagtggtagacactgagtttgcattcaaaggcctcagacacagagagtactagctgactcttctgacagtcaggtaggttaaggccccagcctgggtctttgggctttatcatccccttacttccctccaggatacatccagcggcggctgatcaagtccatggagtcagtgatggtgaagtacgacgcgactgtgcggaactccatcaaccaggtggtgcagctgcgctayggcgaagacggcctggcaggcgagagcgttgagttccagaacctggctacgcttaagccttccaacaaggcttttgagaagaagtgaggaggcgggcaggcgggtggttctygcccctggggctcagggcctgagtagtaggattcccatacctattccagagagatagcctggtatgtgtcttgcactagagcttrcctttcagcatccttccccacctatctgaaacagctgtgtgacatgggggaggtggtggatggaggtggatttaagattggtccccacatcgtccctgctgatattataaagcagatgcagaggggtgggcctgtactcaggtcccagtggcagtccttgggcctgaatttttctctgtccaggattcttgcctccaaaccactgtacytggtcggctgtgcacctttgggaaccttacagtgcgttttgtggggaccaaggtcccagagcccacctgtccactagctaccccttgcacttccaggttccgctttgattataccaatgagagggccctgcggcgcactctgcaggaggacctggtgaaggacgtgctgagcaacgcacacatccagaacgagttggagcgggaatttgagcggatgcgggaggatcgggaggtgctcagggtcatcttcccaactggagacagcaaggtgcgtgtgggtcgaagtgctgatgctagagatgtgcctccctggatggctgtccccagacacagccctccctccatttccccctctctcaggtcgtcctcccctgtaacctgctgcggatgatctggaatgctcagaaaatcttccacatcaacccacgccttccctccgacctgcaccccatcaaagtggtggagggtaagtacctgcttaggggtctccaagccaggctaggggataggagactgctgggccctggtctaatgatctcctcacctttaattggtccccaggagtcaaggaattgagcaagaagctggtgattgtgaatggggatgacccactaagtcgacaggcccaggaaaatgccacgctgctcttcaacatccacctgcggtccacgttgtgttcccgccgcatggcagaggagtttcggctcagtggggaggccttcgactggctgcttggggagattgagtccaagttcaaccaagccattgtgagtgttgtgctcttcacagcagtcttcttttcctccttttacctgttgacttctgtggtttccaagagcagcccacttctgtccacaacctacagaataggttctgtaggttctgtcccacctaataatagctctcattcatggagagactgcttgtaccttaccaagtcctgtgtttggcccattatcgctttataccatcatggctttaatacactcctagtaggggagggtttgttagtcccatgttgcagagacaaaaactgaggcttggagagagtgactggattgtgtgatggtcatataggaagtaagtggcatgactgggatatgacataggagaattgttctttttttttttctctacactctctgctgtgtgcagggtctaatttagataaagatagggaattggggctaggtggggtggctcacacctataatcccagcactttgggaggccgaggcgggcagatcacaaggtcaggagttcgagaccagcctgaccaacatggtgaaacaagggtgaaatacaaaacttagccgggcgtggtggcgtgtgcctataatcccagctactcaggacgctgaggsaggagaatcgcttgagcacaggaggcagaggttgcagtgagccaagagtgcgcctttgmactccagcctgggcaacagagcaagactccgtctcaaaragggagttggagagagtaaatagaaaaaagatttatggctattggaatgtgctttcactggctttaaggattttataggatagtaagagggtaaagcactgttacaggygtacctctgaacctgtttactgtaagtcagtttttataaattaaataattaaaaatgtattagggaacaccatagaacatggctgaaagaaattgtaaaagacctaaatgaggccgggtgcagtggcttatgcctgtaatcccagcactttgggaggccgaggtgggcagatcacctgaggtcaggagttcaagaccagccttaccaacaggaagaaaccccacctttactaaaaatacaaaattagcagggtatagtggcacatgcctgtaatcccagctactctggaggctgagacaggagaatcacctgaacccggggatggaggttgcggtgacccgagattgcaccattgcactccagcctgggcaacaagagtgagactgtatcaaaaaaaaaaaaaaaaaccctaaatgaaagacctctcatattcatggattggaagacttaatattgttgaatattaatattgttaatatacttcccaaaataagctatagatcyaatataatccctatcaaaattccaactggctttttctcagaaatttattaagctgatgttaaaattcatatggaaatgcaagggatatagaatagccaaaacaatatttaaaagtagcaaaagtttggagaactcacattcctgatttcaaaacttactacagagctacagtaaacaagactgtgcttctgtcatgaggatacgtataaagactgatagagtagaattgagagtccagaaataaaccctcacatttatggtcacttgattttttgcaagagtcccaatttaattaaatggggtgagaatactctttttagcaaatggtgctagggcaactagatatccacatgcaagagaatgaagttggattcctacctcataccatgtacaaaaactctcaaaatgcctaaattgaagagctaacactataaaactcttataaggaaacttgaataaatcttcatgactgtggcttagcagtgaattcttaggtatgacaccaaaagcataagcatccaaaggaaaaaatagatgaattggacttcatcaaaatttaaaacttaatgcttcgtaggacactatcaagaaagtaaaaagataacacagagaatgggagaaaatatttggaaatcatctgataagggccatacataaagaatatataaagractataacaataaaaagtcaacaataaaaagtctcaaaggatttcaacaaatgtttcctggctgggcgtggtggctcacgcctgtaatcctaacactttgggaggctgaggcgggtggatcacctgaggttgggagtttgagaccagcctgatcaacatggagaaaccccgtctgtactaaaaatacaaaattagccgggcatgtcggcacatgcctgtaatcccagttactcgggaggctgaggcaggagaatcgcttgaacctgggaggtggaggttgcgatcagccgagatagtgccattgcactccagcgtgggcaacaagagtgagactctgtctcaaaaatagtaataaaataaaaaaacaggctgggcgcagtggctcacgcctgtaatcccagcactttkggaggccgaggcgggcagatcacgaggtcaggagattgagaccatcctggctaagacggtgaaaccccgtctctactaaaaaatacataaataaataaatawtaaaaaaaacatgtttccccaaagaagagtactattcatgtaaatgatcagtaagtgcatgaaaagatactcaacatcattagccatcagggaaatgcaaatgaaaccagagtgatgtgccacttcacatgcactaggatgactgtaatccaaaacacagataataacaagtgttgacaargatgtggaaaaattagaaccctcatacattgctagtagaaaaggtacaactgctttaggaagttaaagcagttaccatatggcccagcagtttcattcctagagagattatacacacacacacgagagaacagaaaacatatggccacacaaacatttatacacaaatgttcgtatcagtgttacagtagctaagcagtgaaaacaagtgtccatccactgatgaatggataggcaaaatgtgatatgtccatatgagggaacatcattcagcaataaaaagtaatgaacaggctgggcctacgtggtggctcacgcctgtaatcccagcactttgggaggccaaggcaggtagatgacttgagttccagaccagcagcctgcccaacatggtgaaacccccaactctaccaaaaatagaaaaatgaagtgtggtgctacatgcttgctatcccagctacttcggagggtaaggcaggaggatcacttgaacccaggcagcagaggttgcagtgagctgagactgcaccaccgcgctccagcctgggcgacagagggagaccatctcaaaaaaaaaaaaaagtaacggacagccaagcacagtggctgatgtctgtaatcctagcactttgggaggctgaggtgggaagattgcttgagcccagaagttcaagaccacccttgggcaacatgacaaaaccccatctctacaaaaaatttagccaggtgtggtggagtgcacctgtaatcccagctacttgggaggctgaggtgggaggatacctgaggccaggaggttgaagctgcaatagtgagctgagatcatgctactgtacttcagcctgggcaacagagtgagactctatctcaaaaaaaaaaaatctgtcaagccacaaaaagacagtgataagccagatgcactggctcataactctaatctcaacactttgggaggccgaggcaggaggctcacgagagcccaggagtttgagaccagcctgggcagcataacgaaattctgtctttgccagtgatgaaccttaaatgtatacttgcttaatggaagaaattagtctgaaaaagttagatactgtgattccagttaagtttaatttcgtatgtgactatctcataacacatatggggagcttcctatttagctaactgttataaaatgaatatttacggagtaattttaacataggtttagaaatttggatcttggccgggcgaagaggcccacacctgtaatcccagcactttgggaggccaaggcgggtggatcacctgaggtcgggagtttgagaccagcctaaccaacatggtgaaaccccgtctctactaaagatacaaaaaaatattagctgggtgtggtggcacgcgtctgtaattccagctacttgggaggctgaggcaggagaatcgcttgaacctgggaggcagaagttgcagtgagccgagatcgtgccattgcactccagcctaggcgacggtgagactccgtctcgaaaaaatttggatctcagatggtatagtagctttctttggatgtgctgcataccaggtgccaaatggcrtcctataaatggaagctcttgtgtgaggaaggggatgatcaaataagagttttgtttttgttaagagtctgtctgcyttttccgaaytcatctanccatgtcctttaagatkacagtcctggccctgtgataagccagatgcagatccacatcgtactcattcactgaaagagaggcgttggctttgtctgatgctagctttttcttaggcgcatcccggggaaatggtgggggctctggctgcgcagtcccttggagaacctgccacccagatgaccttgaataccttccactatgctggtgtgtctgccaagaatgtgacgctgggtgtgccccgacttaaggagctcatcaacatttccaagaagccaaagactccttcgcttactgtcttcctgttgggccagtcygctcgagatgctgagagagccaaggtagggatcaggactgctgggctttttggccggaagaaaagaaggagaactcaactgggtrtggtggctcatgtctgtaatcccagcactttgggaggccaaggcaggtggatcacctgaggtcaggagttcaagactaacctggccaaggtggtgaaaccccatstctactaaaaatagaaaaattagccgggcatggtcgtgtgtgcctgtaatcccagctgctagttggggctgagacaggagaatcgcttgaacctggggggcagaggttgcagtgagccgagattgtgccactgcactccagcctgggcaacaagagcgagattccatctgaaagaaaaaaagaaaaaaaaggagaacttttccccttgaataaagggttttggattcccttgataaggagggttagaagagrcgtttagagctactcagttccctgtgtcatggacttctgtctcttcccaggatattctgtgccgtctggagcatacaacgttgaggaaggtgactgccaacacagccatctactatgaccccaacccccagagcacrgtggtggcagaggatcaggaatgggtgaatgtctactatgaaatgcctgacttygatgtggcccgaatctccccctggctgttgcgggtggagctggatcggaagcacatgactgaccggaagctcaccatggagcagattgctgaaaagatcaatgctggtaagcctaggagggctggcctggctcaggagccccgctctctgggctaccacctatcgtgttcaccgcacttgagcccccaaagagctacccaccctcacccccatgcatgtaccagttccgcccctccgaggcatcctccaactctccaggtcccctctgcactccctttctcttctgaatgttctcccttcccctttccagggggttctatgaaaagaaagtttctgtgaggagcggggagccaaaagagagccttgctcagagagagctgcgagtggacagtggctggggccagtccccttagctgcagcctttctcatggctcctcaccccaccaggttttggtgacgacttgaactgcatctttaatgatgacaatgcagagaagctggtgctccgtattcgcatcatgaacagcgatgagaacaagatgcaagaggtaatgggggtcctagaartcagygtgtcacatgtataaaackcatgaatcacgttagagaccaaagaraagaagatgcaatcaacrttgaggggcggccaggcgyggtggctcacgcctgtaatcccagcactktgggaggctgaggcgggtggatcacctgagctcgggagttcgagaccagcctgaccaacatggagtaaccccgtctctactaaaaataaaaattagccgggcatggtggtatgtgcctgtaatccyagctacttgggaggctgaggcaacaagagtgaaactatctcaaaaaataaaaaaaacattgaggggccagtcatacccacctaatttagggatagggaatggtgattagcaacgattttcaaaatccacagcaccggccgagtagataaaacaggtggtgttgaaataggagataggagtgcctccctgtcacgctgtcacttggctctcctcccccaaggctcctgcagcttgctttgcttagggaatacaagccccacccctgaggcaggggccagacttgggggcaggttgggcagtaggcattgctatgtcctaggggaagtcgtgtgacagccataacaagacccatgaaaaggctggatcagtgacttcactcctgggcatggctcctgagatacttgtttggcacatgttggtacctggtgctttagtaataaaaactgaagaactcaggctgggcatggtggctcacacttgtaatcccagcactttgggaggccgaggcgggcagattacctgaggtcgggagttcgagaccagcctgaccgacatggagaaaccccgtctctactaaaaatacaaaatgagccgggcrtggtggcgcatgcctgtaatctcagttactcaggaggctgaggcaggagaaatgcttgaacatgggaggcagaggttgtggtgaggcaagatcacaccattgcactccagcctgggcaataagcgaaactccatctctaaaaaaacaaaaacaaaaaactgaagaactcactaactgctgaactgctgtcagagaacagttataaaagcattgataggtcttgatggaatacagtatatggccattagaagtgatcactgtcatgccagcagcagcctagatgaacacgcagtgaagtgccagagcagggaatggtgtgtgctcgggtacagcagttgggaggatatgacatgtacgtggagcccgcctctcgctaggcgcaggactgcacaagagtggaagttgtgacggggtggtgggatttgggtgcctttccttaggcttcttttaatattgtaaaatcaggattaaaagtctcactggagaattgctggaacatgggaggtagaggttgcagtgagctgagatcgtggcattgcactccagcccaggctgataacagcgagactccacctcaaaaaaaaaaaaaagtctcactggaactgtgaggggcagagcctggtgactgactcgtttggccctcaaagaggctgtagttggaggcgagagctggggaagagaccagaggatgccaagtgctgacctcactctcactgcaggaggaagaggtggtggacaagatggatgatgatgtcttcctgcgctgcatcgagtccaacatgctgacagatatgaccctgcagggcatcgagcagatcagcaaggtcagccatcccctctgccaccgccttcctcctcccactcccacactcccctccctgcctactctgagcacgctgtcttcccacaggtgtacatgcacttgccacagacagacaacaagaagaagatcatcatcacggaggatggggaattcaaggccctgcaggagtggatcctggagacggacggcgtgagcttgatgcgggtgctgagtgagaaggacgtggaccccgtacgcaccacgtccaatgacattgtggagatcttcacggtgagcccgtgtgtgctgyctagctgcctttcgtggatctctggctctcasgcccctcattctgtgctgtccactcaggactttttctgcctgattccatttctgagtgtgggatatcctggctcctgacaccctccctggatctgggtggcgacagaagcagggaagagagcagagttgctcagtcctggccctcccctccacttccctcccctgtgccaggtgctgggcattgaagccgtgcggaaggccctggagcgggagctgtaccacgtcatctcctttgatggctcctatgtcaattaccgacacttggctctcttgtgtgataccatgacctgtcgtggccacttgatggccatcacccgacacggagtcaaccgccaggacacaggaccactcatgaagtgttcctttgaggaaacggtaacagtggaatttctgaatagggcagaaggagggagtagtgtgagaagaagggcacacactttgggcagctgggctgtggtgatgggacagtcaggtgctgtgtgtggaggggtctcatggggccggtctgctctgttcaggtggacgtgcttatggaagcagccgcacacggtgagagtgaccccatgaagggggtctctgagaatatcatgctgggccagctggctccggccggcactggctgctttgacctcctgcttgatgcagagaagtgcaagtatggcatggagatccccaccaatatccccggcctgggggctgctggacgtgagtatgaggccccagctgcggtacytgcttgcgtcggcgaggcgggggggcaggccatgggtgcaagggtgtcaccagtccatgattgctgttcttgctcctcacgatttcctgtgttcctctttgcagccaccggcatgttctttggttcagcacccagtcccatgggtggaatctctcctgccatgacaccttggaaccagggtgcaacccctgcctatggcgcctggtcccccagtgttggtgagtaacctgatccaggaagagggccctccaggtggttcagaggtggataagctgggatcgtgaacggtagccattgttggaactctgaaggccgcagagggctagtgaaaggtggggcagggagaattgggggcctttggtctcccgctctggccttaacttgcttctctcactctatagggagtggaatgaccccaggggcagccggcttctctcccagtgctgcgtcagatgccagcggcttcagcccaggttactcccctgcctggtctcccacaccgggctccccggggtccccaggtccctcaagcccctacatcccttcaccaggtgagttgtcgccatctgtcaggccaggtttgtttcctccacagttctgggtgagtctgtccattgctcatctcctttgttggctgcttccccacaggtggtgccatgtctcccagctactcgccaacgtcacctgcctacgagccccgctctcctgggggctacayaccccagagtccctcttattcccccacttcaccctcctactcccctacctctccatcctattctccaaccagtcccaactatagtcccacatcacccagctattcgccaacgtcacccagctactcaccgacctctcccagctactcacccacytctcccagytactcgcccacctctcccagctactcgcccacctctcccagctactcacccacttcccctagctactckcccacttcccctagctactcgccaacgtctcccagctactcgccgacatctcccagctactcgccaacttcacccagctattctcccacttctcccagctactcacctacctctccaagctattcacccacctcccccagctactcacccacttccccaagttactcacccaccagcccgaactattctccaaccagtcccaattacaccccaacatcacccagctacagcccgacatcacccagctattcacctactagtcccaactacacacctaccagccctaactacagcccaacctctccaagctactctccaacatcacccagctattccccgacctcaccaagttactccccttccagcccacgatacacaccacagtctccaacctataccccaagctcacccagctacagccccagytcgcccagctacagcccarcctcacccaagtacaccccaaccagtccttcttayagtcccagctccccagagtataccccaacctctcccaagtactcacctaccagtcccaaatattcacccacctctcccaagtactcgcctaccagtcccacctattcacccaccaccccaaaatactccccaacatctcctacttattccccaacctctccagtctacaccccaacctctcccaagtactcacctactagccccacttactcgcccacttcccccaagtactcgcccaccagccccacctactcgcccacctcccccaaaggctcaacctactctcccacttcccctggttactcgcccaccagccccacctacagtctcacaagcccggctatcagcccggatgacagtgacgaggagaactgagggcacgtggggtgcggcagcgggctagggcccagggcagcttgcccgtgctgcygtgcagttcttgcctccctcacggggcgtcacccccagcccagctccgttgtacataaatrccttgtggcagagctcccggtgaacttytggatcccgtttctgatgcagaytcttgtcttgttctccacttgtgctgttagaactcactggcccagtggtgttctcactcctaccccacccaccccctgcctgtccccaaattgaagatccttccttgcctgtggcttgatgcggggcgggtaaagggtattttaacttaggggtagttcctgctgtgagtggttacagctgatcctcgggaagaacaaagctaaagctgccttttgtctgttattttatttttttgaagtttaaataaagtttactaattttgaccaaaagtatgtacatcgagtgcttcattggggttcaggagacccccaggcccctgcctcctgcctgggctgctgcttgatctgttagggggaggggaccaggaaaatgggagggtaccttacagtcagcccacacacagcccctgctctgtgccaggcactgctctgtactgagtttgttgtagtcacaacagatgcagctcttgtcctctattaaggtgatattgaccataacagctttttaacttgttttactgattgtcataaataatttggaaaagtgtagaaaagtataatgcagagggagaaaaatgatcacccataatcccaccactaggaggcatactttctttggtattttttcctatacttttcttgagtcactaacaagtgaacaaaaatgtactttgattttggcctcaaaccaagaatgaaaagattatatagatgttgtaatacagaagctgaagtaaaaggacttgggggtaatacgctagttttagccggctatttttccccctttcattagcaccttaatgtggtatcaatgttctacatcctctgcaagtcatttctgatttacctgaggtatttttatttttattttatttttttgagacagtctcgctctgttgcccaggctggagtgcagtggcgcagtctcggctcactacaacctctgcctcttgggttcaagcaattctcactgcctcagccttccaagtagctgcgattgcagatgtccgtcaccatgcccagctactttggtatttttaatagagaagggatttcacagtgttggccaggctggtctcaaactcctgatttcaggtgatctgtccactttggcctcccaaagtgctgggattacaggcatgagccactgcacctggcctgttatctagaaatgtctattttgccttcattcctaaagaatatctttgctagagataggattctggtgtgacagattcattttttgtttttagcactttttttttttttttaggagcagaggtttaatatgcaaaagatagagaaaagagaacagctcgctctcttgtgggggagaggggcttctgaaagggaagtccctaagatgtcctatcttccggccctcacagtttctagtgagaagttcacagtctttgggatcatatttcttgtgttatttttctctaaatgctttcaagattttctttttatctctggttctttggtttttgacagtttagctttggtgtgtatattggagttctccagagaagcagaaccattgggagagatagatatatatcttcctgtgctaataatcacattacttttatatgtgattatatatatacatatatatttttttctatttacttgagcttccccacagcaaaaatgaggggttttgtcatgggaattcgctcaaacgattacagggaccaagaagtttcacaatctgccatctgtaatctggagaaccaggaagctggtggtgtaattcagtcttgagtccaaaggcctgagaactggaggtggggtggtggtggcagtggtggcagtggtggcgctggtgtaagtcctggagtctaaagacccaagaattgggagcttctaggtccaaaggcaggagaagttggatgtctgagctcaaggagaggactcacccttcctctacctttttgttctttccaagccctcacttgattggacaatgcccacctatggcggtgcaagagaaccttactcagtctaccgattaaaatgccgacctcttcaagaaacactctcactgacacacccagaaagaatgtttttccagctctctgggcgttccttaactcagtcaagttgacgcgtaccattaaccaccactgtgtgcccaggcatagttttctcatttatcccgtttgagtttccctgagatttttgattctgtaaaattgccttttagcgtatttgggaagtttttagacttttttttttttttttaagatggcrtctcggtctatcgcccaggctggagtgcagtggcgctatcttggctcactgcaacctctgactcctgggttcaagcgattctcctgcctcagcctcccaagtacctgggactacaggcgcctgccaccacacccggctaattttttgtaattttagtagagacggggtttcaccatgttagccaggatggtctcgatctcctgactttgtgatccacctgcctcagcctcccaaagtgctgggattacaggcgtgagccaccgcgcctggcctagacattctttcaaatactttttttctgtcctattctttccttctgagaattcagtagcatgcctactagactttttgatttccccccccacaggtttttgaggctcttaatcatttttgcaaatttttctctcattcttttttcgagatggagtttcactcttgcccaggctggagtgcaatggtgccatctcggctcactgcaacctccgcctcctgggttcaaataagtctcctgcctcagcctcccgagtagctgggactgcaggcatgcaccaccacacccagctaattttgtattttttttttttttttttttagtagagatggggtttcaccatgttggtcagactggccttgaactcctgacctcaggtgatccagccatctcggcctcccaaagtgctggggattacaggtgtgaaccactacgcctggtctggggggcacattttattttattttatgttattttttatttcatatggtatgttttatgttatgtttgttatgttatttattttgagacggagtcttgctctgtcgcccaggctggagtgcagtggcgtgatctcggctcactgcaagctctgcctcctgggttctcgccattctcctgcctcagcctcccgagtagctgggactacaggcgcccgccaccacgcccggctaattttttgtatttttagtagagacaaggtttcaccatgttagccaggatggtgtcgatctcctgacctcatgatccgcccgcctcggcctcccaaagtgctgggattacaggcgtgagccaccgtgcctagcttggggggcacattttaatcagcaaaataacaaaaaccttcaagctatgaaaaacatgtcattaagtagattgaaaatagaaaactagaaggcagagcactgccttgtttaacctcagtggtgaacgtgtgcgttgggtgactcaaatttttcaccagtttgctcatgtctgcaaatggccacaattattgattttaaagttataaataaattttaggaagtaggtgaatttgcaaatattaaatccacaaacaataagaatcaactgtatgtatgtgtcttctctttttctctccctctctccattttttcattcatcctgagaatatatataatttttttgagataggttttcactctgttgcccagactggagtgcagtggcgcagtctcagctcactgcagcctcaacctcccaggctcaagcgatcctcccactcaggctcctgagtaggtagaactacaggtgtgagttaccacgcctggctaattttattttttgtagagacaaagtctcactatgttgcctaggctagtcttgaactcctggactcaagcgatcctccctccttggcctcccgaagtgctggaattacaggcatgtgccaccgcacccagctaggttcatttttgtttttatttatttatttatttttgagatggagtttcgctcctgtcgccaaagctggagtgcaaggacacaattttggctcacctcaacctttgcttcctgggttcaagcgattctcctgcctcagcctcccaagtagctggaactacaggtgcgtgccaccacacccagctaattttttagtagagactgggtttcagcatgttagccaggatggtctcgatttcctgacctcgtgatccacctgcctcrgcctcccaaagcactgggattacaggcatgagccactgtgcccagcctcaagccataggtttttatgctacatgggactctatcatcattattccaaatcattttctaatttccattttgatatgtttgatctgtgagtgatttattttgtacacatatatatatatatatgtatttttttttcttttctgtttttcgagacagagtctcactctgtcacccaggtttggagtgcagtggtgcaatcccagctcaaagcaacctccacctcccaggttcccatgattctactgcctctactgcctcagcctcctgagtagctggaattacaggtgcacgccaccacgcctagctaatttttctgtatttttagagacggggttttaccatgttggccaggctggtctccaactcctgacctcagggtgatccactcaccttggcctcccaaagtgctgggattacaggcatgagacactgggcccgacgaatttttcaatttcatcttacttgtcttactttgtatgcttaatgtttttagttcattccagcttaaaattctaatactttcctggtgaatggactcttttatcattgtagcaatcctctttatctcaagaagtgctttttaacttagggtcaatttttttttgtttttgttttgggatgaagtctcgctctgtcacccaggctggagtgtggtggtgcaatcttggctcactgcaacctccatccctcaggttcaagcaattctcctgcctcagcctcccaagtagctgggattacaggcgcctgccaccatgcccgggtaatttttgtatatttagtggagacagggtttcaccttgtttgccaggctggtctcgaactcctgacctcagatgatccacccacctcagcctcccaaagtgctgggattacaggcgtgagccaccatgccaggccaacttagggtcaattttatctgagatagctacaccagtttttctttcagttggaatttttcaagtatattattcttccatctttctgtatctttacatttaagcctcttataaatagtatatcatgggcttttgttttttataccttcttacaaccaattgtccttttattggagaatttagcctatttgcatttagtatgactactaatacatttggattttcttcctactctcttatttacttcagttatctttctcacttttcctcctttcctctcatgccttccagagggttaatgttttttctcgtttcattattttctcactatatgtttaaaatctatgctttatgtctattttttgtgtgtgactaccccaattattatttttctttttttttgtattttattttttaaaaatttaccaaaattattttaagctatataagttgaagtctaaagttagaaatataggctggatgcagtgactcatgcctgtaatcccaacactttgggaggttgaggcaggaggatcacttgagtccaggaggtcgaggctgcagggagccaaaataatgccactgcactccagcctgggtgacagggtgaacgctgtctctaatcaatcacaatcaaatcaaataaataagataaaatatagttaaaaaacacagttactctcttgctgaatcatactaggatcttacaatgcttcaattctgaacccttctttcatttaaatgcaactactgtctagtatttgtactatgacaattgtcataaataagacattattatattttactattaaagttagtttagatttccttagatatctatcaatatctttttttctttttgagacggagtttcgctcttgttgcccaggctggagtgcagcagcgagatctcggctcatcgcaacctctgcctcccaggttcaagcgattctcctgcctcagcctcccaagtagctgggattacaggcatgagccaccatgcccagctaattttgtattttttagtagagatggggtttctccacgttggtcaggctggtctcgaactcccgaccttgggtgatctgcccgcctcagcctccca

SEQ ID NO: 96115 - DNA, 13622 bp, Homo sapiens
gtagtggcgcgatctcggctcactgcaagctccgcctcccgggttcacaccattctcctgcctcagcctctcgagcagccgggactacaggcgcccgccaccatgcccagctaatttttttgtattttcagtagagacggggtttcaccgtgttagccaggatggtctcgatctcctgaccttgtggtccgcccgcctctgcctcccaaagtgctgggattacaggcgtgagccaccacgcccggccagtctccatgttttcacaactctccaattcttctttatcagtgcttccaactatccacttattagttagcctttgatggatgtctgcttccctatgggactgtgggcaccaagagggtaggaaccagagtgtttttgctcattaagacaactcaatacttggcacagtgcctggtacattgctagtgcacagtgaatatttgttgaataaatgaataatcagtaactttcaaagggggttcttaggtggagctttaatgggaagcgtcagtgccattgcctgggctctgggggcagctgtgagtccagatctcatggcttctgttcagggcctggtccacatccagcctctgaccttgtgcccaaaggccattcaggcaaaaagaggtggaagagtyttctcctagagggaggtagtgcaaaggtggcattagagcattaaggtggctcggatccagaatcttctccccacttttccactcctccaacctgagtttgcaaaagcactaccttccactgcccccatatcttcttcttgtggcctattcttcttccctcccagaggtttccttcccctcaaaatgtgccgcctcccttgagctgtttccaatgttgtgctcatgaacttgaacatcattctctcttacctggtaaagcccccaggaagagacgcccttgaggcttggcccagaggttaaggaggggagccaggcctaagggaggcagggcaagggccttcatcttcgacccttggctcaagaccaccctggacatactcagcttcagctgaagagggagtcccaagaccaggggcagatccagccctggccccgacccagaagacaacaccaccttctgcagagtgtgtgggaaagggacggtagagagagagggaagaatgagccgggcctactgcctgtggcctcacccctagctgccttaattctgcctcttcgctatgcctccacctactggccattctcaccacttaaatcctgccccaattttttttggcttgaccctttttgaaaccacacctgccccaagtaaatatgcagtctaagtcaaaactgtttgcttgctgtggggagcttcaagatatgtccctcgcccctaccacccacctgagtgccatccataagccttatttttatttttatttttttgagacagggtctcactgtggcccaggtcagagtgcagtggcacatcatagctcactgcagcttcaaactcctgggctcaagtgaacctcctgcctcaggctcctaaatagctagggcagcagacatgtgctaccatgcctggctaatttttttttttttttagacagaggtctctgctatgttgcccaggctggtgtcaaactcctggcctcaagtgatcctctggtcttggcctccagcacctgggattacaggcaagcaccaccatgcctggctaattattaatgaaaaacaattctgtggagccagtcttgttatgttccctgggctggaaaccttcctaatattgacatgttggactcccctcttccctcattgctccaggctccactgaatacaggcaatgccccactgtccccctttacttgatcttggaggtggagactgagccaagatgggttctctggtgtcccaagagcaaggaggtggcctgagcctgctgcctgcttgagtcccaggtccaaagagaaggcccagggctctgcatgaggctggggaatgtctgtggggagaaatgattatcctgaggcctcaaagctggggtctcaaggaggaaaggggccagtggtagagggggacagaggcaggctgagctggccagggtgggaaaaatagactccgaggaaatctacctcggagattgaattctgcctgagtccctggagggagaaatatcccgggatttgattctacatcacagcttctgaggctagtgggggcagatgctgagatctcggcctgtttgtccagccaggaatcccggcgcaggcagccatccagggcaggaaccagctggagtgtgacagagataagatayggggatgtagaaatcagggcatcggagccgcagtcccgacctccctgccctcagttgactcccctctgagcatttggcctcccccttgcagctctcaacccttcccttctccctaaaagtgtggacttagattcccacggccagccacccagcagtgctttaccaagtcttggctagggttccacccctggggtgtagttaccrgcaaccgaaggttggaagcggggaagagcagccccccaagcgcaatcctcatgatgggatggcgtttgctggtcaggggcccagagacctgtctcaggcgcagcacctcctccccatccacctccagcagcacagagtccccctccatcttgacttccacctgcaggaaggtgggaagcaaaatcagaggcccctgggatctgtttctgccaccttcctgtgaggcagcctagtactatagtggaaagaacatgccttaaagaagcagctagcatccttggccttgggtcactcagctcttgtcacttatatactgactgagccttagaattcccatcagaaaagatggggccaagaatagctactttgtgggggttcgtgtggattaaacgagatgacagtggtaaagggatgcccaataacttggttttgttccctttcctcagaccagctccagacatccctcccctgaggaccagagctagcttacctggtgccatctcccatcatccagccgtggtccagcacccaccgtaagctgggcccagtgattgtgcagttggatctcaggcctgccgtctcgaagtcccagcataaaccagtcatccttagggttggtatccccataaaaaatcactccctctgggtcccaggttcgaacctcaaaggaggaggaggttctggaaggacacagaaggaaagattgtgtatgtcatgtgtcctttgagaaccagtgtgggtttgggggagatggtgttcacagataaggaaaggaagacagggaaaagagaagagctgatggagagagggcagaaccaggggactgggtcaagggctaggccaaccccatactttgtgatcttggtgaggtcaaaggtcatgacagcgataggctcttgtcctgggccattgctgaggtggacagccggagggtcgtgggcactctatcagaaagagaaaacaaacaaagctgagtagggacatgtcagagacagacagagggagaggccctgctacagggccagaggagagaagggaagactgcatgagctgagtgccctgtcccgctcctgcacctgggtggggagaacaggtctcagggcccatccctggcgggtgtgacgcagtagtagcaacagcagcaacagcagcaggcgcgaggtagccagtgggcctctgctctccataatcagccactgtccactcggcggctcagacaactcttgggagaatgtgtagaggcaggcagccttgygtgtgggcggtggagggttaaaggttgcccggggaggagggggtaaaggaaacaggggcactgacccttgacccctgcccaggggcccagtcacaagactcagctatcacccctctggggatcaatggggtgaaggacagagtcccctccactatcatcctccactgccgagaaagtttctgaactgggagaggatattccatctcccctctcctcctctagggcctgatctaggtcctccaagatttctgtccactcggggagcctgcattcacaggcctgaggtctagaaacagtcctcccctgcgtcccaagtagcatcctgtatcaggactagaaatgagataatggaatcctaaatttctagctgagtgaccttgggcaagtcacttcacctttgtgcttcagtgtccttgtctgtaaaatgaggaaaataatactttacggggtgactgtgaaagagggttcattgagaaaatgcaggcacagtgcctggcatctggtctgaactcctcccccagtcttttcccaggcctctgaggcctgtctcccaagaaggtattgtctgtgtgtatgattcagtgaatattaagaagggacctgccccccgcctctcagttatcttcccttatccatttattacagggcctaaacagtctagcagtagaaatcacccactccctgacccattttattttattttattttattttattttattttattttagacagagtcttgctctatcacccaggctggagtgcagtggcgtgatctcggctcactgctgcctctgcctctcgagttcaagcgatcctcctgtctcagcctccttagtagttgggactacaggtgcacgcaccaccacgcccagcaaatttttttgtgtttttagtagagacggggatttcaccacgttgcccaggctgatctcgaacctctgacctgaaatgatccgcccacctcagcctcccaaagtacctggattacaggcattagccacaaggcccgaccctccctgacgcattttattttatttatttattttgagatggagtttcgcttttgttgcccaggctggagtgcaatggcacgatctcggctcactgtaacctccacctcccaggttcaagcgattctcctgtctcagcctcccgagtagctgggagtaaaggcatgcgccaccacacctgtctaatttttgtatttttagtagagacggggtttcaccatgttggtcaggctggtctcaaattcctgatctcaggtgatccgcctgcctctgcctcccaaaatgctgggattacaggtgtgagccactgtgcccaccccatgacccattttaaaatgcaaatgacagaccgggcttggtgggtcacatctgtaatcccagcactttagaaggctgaggcgggcagatcacttgaggtcaggagttccagaccagcctggccaacatagtgaaaccccgtctctactaaaaatacaaaaattagccaggtatggttgcccatgcctgtaatcccagctactccgagggtgaggcaggagaatcgcttgaacccaggagggagaggttgcagtgagccgagatcgcgccactgcactccagcctgagtgacagagtgagaatccgttaaaacaaaaaaaaagagaagaaaaaagaaaaaaaaattagccgggcgtgccggtgcgcgactgtagttccagctactccggaggctgagacaggaggatcgcttgaactcgggaggtggaggctgcagtgagcagagatcgcgccactacaccccagcctgggcgacaaagcaatacaccatctccaaaaataaataaataaataaatataaaaataaaacatttaaaaaatgcaaatgcccccaagaggtaacacttcatgctactcaagagctgcaggaaacagctttcagagctgagggtcttaaggcttacccagggtctgggcgggtgagtgagcctgaggctaaagcaggttatcactgcatatgtcaatttaaaaagcactgcgggggagcctttgaaccgcggggtatctcgacccaggttgggacacccacacaaccgcaaggaagccgcttcactccaaccttgaactctacccaggagcccagtcacaagatccagctgtcgggggtggggcttggggggggacgcggccgtgcctgttctccaagctgattggctgacagttgtgccccctgctgcgacagaattcgagggggtggggctatgcccggacagaggatcgcctcgctggcctactctctcctcccgtacggcgccggaatcccagctccacttaccaggccgcggctaccccgccgtcccccccgactcccgccaccccgctctctcaggctcttcaggatccaagtccgtaggccctttaaggggtctagttgccgtttgcgaggccctgggactttggtcccagacagcggggatccggatggcttccgtgcggatccgagaggccaaggagggagactgtggagatatcctgaggctgattcgggtgaagactgcaggccggtaacccgggggtcagagtggcgcggccagagcggggtcgtaggaggcgggggcagggggaggggctcgccttgggaacctgctcggggagcagcggggcccttctgctctaatctagcttccgtacccacgccttaggagctagccgaattcgaaaaactctcggatcaggtgaagatcagtgaagaaggtgggggctcagcgcccaggttctggcggaggctggggaggaaatgagggatgggttccccaggcgacagctccaggctgggcatacacccacgtcctctttctctatctctttgtcacaactccaatctcggcagccctgagagcagatggctttggagacaatcctttctatcaytgtttggtagcagagattcttccagcgcccgggaagctactgggtaagagcacctggcccttagaagtccacctctccagccggcctcagaggtctccccacaggcttccagaagccttactccccttttctctctctcagggccctgcgtggtgggctatgggatatactatttcatctacagtacatggaagggacgcaccatttatctggaggatatctatgtgatgccrgaatatcggggtactgggcagaagctgaggctggggtgggagcaaagcaccccacagaccccactgttatcccctgtccccagagcccagccggtgtcattttctgatccccttcagctcaaasaatagctattttttgcctctttctctccacaacaggtcaagggattggttccaaaataatcaaaaaggtggctgaggtgaggagatgggtggggcgacaagtgaggacctgaagaagcaagggtatatggaggggggacccgggttgaaagagggagtgagaaaacctttttcttttttgaccccagaaaagttagtgttgtcttctcccacaggtggccttggataagggctgctcccaattcygcctggccgtcctggactggaaccagagggccatggacttgtacaaggccctaggagcccaagatctgacggaagctgagggctggcacttcttctgctttcaaggagaggcaacgagaaagttggcaggaaagtgacgccatccctaggaggatctctgtcttgagtttctccttccccatcagctgaagcactcttcagagactacgtccacagacactgatgctgaggcctccctggaggaaggagggttaggggtgcctatcctcaagtattggaagagcagaattgagggagagacctttcttccttgttgagggtgaaaaataaataagaattacatgtcctgatgtggtgttgggtctttcttttatttctttttttttttttttttgagacagagtctctgtcgcgcacgctggagtgcagtggtgcgaactccgctcactgcaacctctgcctcacgggttcaagcaattatcctgcctcagcctcccgagtagctgggactacgggtgcgcaccaccatgcccggctaatttttagtagagacggtgtttcaccatactggccaggctggtctccaactcctgatctcgtgatccgtccgcctcggcctcgaaaagtgctgggattactggtgtgagccactgcacccagtccaaagtctttttttttttttttgagatcaagtcttgctgttgtcctcaggccagagtgcaaggagtgcaaaggtttgatcttggctcactgcaacatccgcctcccgggttcaagtgattctcctgcctcagactcccgagtagctgggattacaggcgcctgctaccacatgcggctaattttcgtatttttagtagagacggggtttcaccttgttggccaggctggtctcaaattcctgacctcaggtagtccgactgcctcggccccccaaagtgctgggattacaggtgtgagccaccgcgcccagcccacagtcttttctttttctttttattttttttgagacagagtctcgctctgtcacccaggctggagggcagtggtgagatcttggctcactgcaagctttgcctcttgggttctcaccattctcctgcctcagcctcctgaacagctgggactacaggcccccgccaccacgcccggctaagtttttgtatttttagtagagacggggtttcaccgtgttagccaggatggtctcgatctcctgacctcgtgatccacccaccttgcctcccaaagtgctgagattacaggcgtgagccaccgcgcctggcctgacagtcttcattttcaatctggtatgccctacaaaagctcatgcctggccgggctcagtggcttatgcctgtgatcccagcagtttgggaggccgaggcgggtcgatcatctgaggtcaggagttcaagagcagcctgaccaacacagcaaaaccccatctctactaaaaatacaaaattagccaggcgtggtggcaggcgcctgtaatcccagctactcaggaggctgaggcaggagaatcgcttgaacctgggagatggaggttgcagtgagtcaagatcatgccactgcactccagcctgggcaacaagagcaaaactccatctccaaaaaaaaaaaaaaaaaaaaaagctcacgcctgtaatcccagcattttggattttgggaggccggcaaattgcttgagcccaggagttcaagagcagcctggccaacataggaaagcaaagtctcgtctctacaaacaatacaaaaaaagccagcacgcaatggcatgctcctctaggcccagctactggggaggctgaggcatgagaatcgcttgatcccaggaagtggaggttgcagtgagccgagatcatgccactggactccagcctgagtgacagagccatacccagtctcaaaaacaaaaacaaaacagcaacaacaaaaatctcaacactttgagaggttgagggtggaggatcacttgagcccaggagttcaagaccagcctaggcaacatgggcaagaccacatctctacaaaattaggccgggtgcagtggttcatccttataatcccagcactttgggaggcaggcagatcacttgaggtcaggagttcgagaccagcctggccaacatggtgaaatcccatctcaactaaaaatacaaaaattagctgggtgtggtggcacccatgtaattccagctacctgggaggttgaggcatgagaatcgcttgaacccaggtggcagaggttgcagtgagctgagattgtgccaccgcactccagcctgggtgacagatggagactctgtctcaaaaaaaaagaaaatggccaggcgtggtggctcacgtctgtatcctaacactttgggaggccaaggcgggtggatcactggaggtcaggagtttgagaccagcctggcgaacagggtgaaaccctgtttctactaaaaatacaaaaattagctggtcttggtggtgcaagcctgtaatcccagctacttaggaggctgaggcaggagaatcacttgaacctaggaggtggagtttgcagtgagccgagattgcactactgcactctgggcgacagagcaagactctgtctaaaacaaacaaacaaacccaaagaaaacaaaaactaaataaataaaatttgcccaggtcagtaacaaatgcctgtagtcccaactactcaggaggctgaggtgggaggatcacctgaaccctagaggtcgaggctgaagtgagtcacgtttgtgccaccacactccagcctgagtgacagagtgagaccttgtctcaaaacaaaaaaaaaataataggttgggtacagtggctcacgcctataatcccagcattttggaaaaccaaggtgggtagatcaatagagtccaagagttcaagactaacctgggcaacagggcaaaacccggtcactgcaaaaaatacaaaaacattagccgagcttggtggcaaatgcctgtagtcccagctactggggggctgagatgtgaggacggcttgagcctgggaggttgaggctacagtgaactgagaacctgtcaatgcactctagcctgggtgacagagcaaagccctgtctcaaaaaacaaactttaatcactaatgcagaagataaaagagtataaactaggaaacttaatacttccaaaattttgtttgtttgtttgagatggagtttcactcttgttgcccaggttggagtgaaatggcacgatctcactcactgcaacctccacctcctgggtccaagcagttctcctgcctcagcctcctgagtagctgggattacaggcatgcgccactacgcctggctaattttgtgtttctagtagagatgaggtttctccatgttggtcaggctggtctccaattctgacctcaggtgatctgcccacctcggcctccaaaagtgctgggattgcaggcgtgagccactgtgcccggccaatacttccaaaatttatcttgcccccatcttgttttgtctttggttttcagagtttactttttttttttttttgagacggagtctcgctctttcgcctaggctggagtgcagtggcgcgatctcggctcactgcaagctctgcctctcaggttcgtgccattctcctccctcagcctcccaagtagctgggaccacaggcgcctgccaccacgcccagctaattttttttttttttgtatttttagttgagacggggtttcactgtgttagtcaggatggtctcgatctcctgacctaatgatctgaccacctcggcctcccaaagtactgggattacaggcgtgagccaccgtgcccagcccagggtttacatttttaatgttattaccctcaccttggtcccagatcttactaatattcatagaatatctttgcactccagtatcactccattttcacaaccacccccatgtctacatccttgggctccagcccattcatcacttcattagccatctataaaatgatcctggccaggccaggcgcagtggctcacgcctgtaatcccagcactttgggaggccaaggtgggcagatcacctgatgtcaggagttccagaccagcctggtcaacatggtgaaaccctgtctctactaaaaatacaaaaattagctgggcgtggtggtgggcacctgtaatcccagctacttgggaggctgaggcagcagaattgcttgaacccgggaggtggaggttgcagtgagacaagattgagccactgcactccagcctgggtgacagagtgagactccctcttacaaaagaaaaaaaaaagtgatcctattaggtgttggggctgattggagtggggtgaaaagggcctgggttctgtccattctaagggaaacagagtggagggtatttaggctaatggctttttaaagggagaataaagaaaacttgggctgggcgtagtggctcacacctgtaatcccagcactttgggaggccgaggcgggtagatcatttgaggtcaggagtttgagaccagcctgaccaacatggtgaaaccctgtctctactaaatacaaaaaaaaaaaaaaattagccgggcatggtggcgcatgcctgtaattccagctacttgggaggctgaggcaggagaatcgcttgaacccaggaggcggaggttgcagtgagccaagattgcgccactgcactccagcctgggcaacagagcaaaactccatctaaaaaaaaaaaattaaaatgtctctcaaatctgtccatagctctatccttacttgcaaagttctcactctttgaaaattgccacaacctccttactggtctcccagcctccttctgtaatttctcccccaattccatgggattttttttttcacagatatacattatgtactttattttattatttaaatttaatttatttctttattttgagaccagtttatgcagctggttttttttttttttttttttttagacggagactcgctctgttgcccccaggctggagtgtagtggcatgatcttggctcactgcaacctctgcctcccaggttcaagtgattctcctgcctcaacctcttgagtagctgggattacaggcgtgcaccaccacgcccagctaatttttgtatttttttttagtagagatgggttttcaccatgttggccaggctggtctcaaactcctgacctcagatgatctgcccgcctcagcctcccaaagtgctgggattacaggtgcgagccactgtgtcaagcccataatttttgtatttttagtagacatggggtttctccgtgttggccaggctggtctcgaaatcctggcctcaagcaatcctccatccacataaatgataatacatttgcccacgtggcgatcaaatccacaaccttggtgttagcacctggctctaaccaactgagctaactggctattgcaaatcttgatttttttttttttttttttttttttttgtgacagggtcttgctctgttgcccaggccaagtgcagtggtgcgatcatggctcactgcaaccttgacctcctgggctcaagtgattctcccacctcagcctctcaagtatctgggatcacagtcaggtgctatcaagcctggctaatgaaagcaaaatttttgtctgggcacggtggcacatgcccgtaattctagcactctgggaggccgaggcaggtggctcacctgaggtcaggagttcgcgaccagcctgactaccatggtgaaaccctgtctctactaaatacaaaaaaattagctgggtgtggtggcacatgtctgtaatccaagctatttgggaaactgagacaggagaatcacttgtacctgggaggcagaggttgtagagagccgagattgcaccattgcactccagcctgggtaacaagagcaaaactccgtcccccaaaaaaacaaaaaaaaaaattattaatctgggcactgtagctcacgcctgtaatcccagcactttggaaggctgaggcgggtggatcacttgaggtcaggagttcgagaccagcctggctaacatggtgaaaccccacccgtctctactaaaaatacaaaaattagccagatgtgggggcaaacggctgtaatccaagctacttgggaggctcaggcaggaggatctcttgaacccgggaggcaggggttgcagtgagccaacatcgtgccactgcactctagcctaggcaacagagtaagactctgtctcaaaaaacaaacaaacaaacaacaaattttttattggagactaggtctcactatgttgtccaggctagtattggactccagagctcaagcaatcctcccactttggc

SEQ ID NO: 96116 - DNA, 14880 bp, Homo sapiens
aagcggtcagtggggctgaggccagggaagttggggcaggagtgctgctaggacctcgtggcgggggcggggtgtagcctctcgtcgcacttccgcaccgcaggtggaagccccagctgcaggagctgctgaagctgcccgccttcatgcgggtaacatccacgggcaacatgctgagccacgtgggccacaccatcctgggcatgaacacggtgcagctgtacatgaaggtgcccggcagccgaacgccaggtgcgctccacgcctgtgcgcgctgatgctggaagcgcgagaggaggggctggcggcggcgctcagccgtcagccaatgagggcagagggcggggctatcggggatcgcagttccgacctggccagccatgccgttctctgtcgacccctgcaggccaccaggagaataacaacttctgctccgtcaacatcaacattggcccaggcgactgcgagtggttcgcggtgcacgagcactactgggagaccatcagcgctttctgtgatcggtgcgtgccgtcctgcgcaagtcagactgccgcgtccccgccctcggtccccagttcccacctgacctgtggccaccccgcaggcacggcgtggactacttgacgggttcctggtggccaatcctggatgatctctatgcatccaatattcctgtgtaccgcttcgtgcagcgacccggagacctcgtgtggattaatgcggggactgtgcactgggtgcaggccaccggctggtgcaacaacattgcctggaacgtggggcccctcaccggtgagagggtggggcaggtgttggcgtggtgtggcgcctcagcggcaagggcctgggaggctgggggctgtttgagagtcctgttgtgatcgcctttggcccgcagcctatcagtaccagctggccctggaacgatacgagtggaatgaggtgaagaacgtcaaatccatcgtgcccatgattcacgtgtcatggaacgtggctcgcacggtcaaaatcagcgaccccgacttgttcaagatgatcaagtgaggaccctatttgggtgggagcccacctccactgactggtcccttttcttgttcttcctgtctgactccaccctttttacctctctccatccttgtctgcctgtgccccgagtgttactgtgttggggaggctaactaggtccttgctgtcatgaccttttctagtggtccaaatagacaaaagccacaggaaacttcgcctataacagatgcccaggacagaggatgtgacctagacatgaagcggggaggcccctaggggagggccctggggctgcccacccctctgcccttgctccagccctgcctcaggcctcctccttgccggtggtctcaacacaaccccactgctccccaggttctgcctgctgcagtccatgaagcactgccaggtgcaacgcgagagcctggtgcgggcagggaagaaaatcgcttaccagggccgtgtcaaggacgagccagcctactactgcaacgagtgcgatgtgagtgggccggctctgctgctctccctgagtgtccacagtggccctccctccccctgactgcactgtcctccctgccccaggtggaggtgtttaacatcctgttcgtgacaagtgagaatggcagccgcaacacgtacctggtacactgcgagggctgtgcccggcgccgcagcgcaggcctgcagggcgtggtggtgctggagcagtaccgcactgaggagctggctcaggcctacgacgccttcacgctggtgagggcccggcgggcgcgcgggcagcggaggagggcactggggcaggctgcagggacgggcttcgggagcccggccgcgcctttccctgagcccccgccggctttctccccccaggccccagccagcacgtcgcgatgaggccggacgccccgcccgcctgcctgcccgcgcaaggcgccgcggggccaccagcacatgcctgggctggacctaggtcccgcctgtggccgagaagggggtcgggcccagcccttccaccccattggcagctcccctcacttaatttattaagaaaaactttttttttttttttagcaaatatgaggaaaaaaggaaaaaaaatgggagacgggggagggggctggcagcccctcgcccaccagcgcctcccctcaccgactttggcctttttagcaacagacacaaggaccaggctccggcggcggcgggggtcacatacgggttccctcaccctgccagccgcccgcccgcccggcgcagatgcacgcggctcgtgtatgtacatagacgttacggcagccgaggtttttaatgagattctttctatgggctttacccctcccccggaacctccttttttacttccaatgctagctgtgacccctgtacatgtctctttattcacttggttatgatttgtattttttgttcttttcttgtttttttgtttttaatttataacagtcccactcacctctatttattcatttttgggaaaacccgacctcccacacccccaagccatcctgcccgcccctccagggaccgcccgtcgccgggctctccccgcgccccagtgtgtgtccgggcccggcccgaccgtctccacccgtccgcccgcggctccagccgggttctcatggtgctcaaacccgctcccctcccctacgtcctgcactttctcggaccagtccccccactcccgacccgaccccagccccacctgagggtgagcaactcctgtactgtaggggaagaagtgggaactgaaatggtattttgtaaaaaaaaataaataaaataaaaaaattaaaggttttaaagaaagaactatgaggaaaaggaaccccgtccttcccagccccggccaactttaaaaaacacagaccttcacccccacccccttttctttttaagtgtgaaacaacccagggccagggcctcactggggcagggacaccccggggtgagtttctctggggctttattttcgttttgttggttgttttttctccacgctggggctgcggaggggtggggggtttacagtcccgcaccctcgcactgcactgtctctctgccccaggggcagaggggtcttcccaaccctacccctattttcggtgatttttgtgtgagaatattaatattaaaaataaacggagaaaaaaaatcctgtttcgctaacggctggtggtagcaggttgagtaccgggagggctgcaagaccgtgattgatggggaggactgcgcagaccctggcgagggtgagcccctccccggaggcgcctgtggaatgtccagggctctggtccgctcctcgggatggggggtgcctaatcctagagccgcattccaggataaggggggtggggagaggctgggccgggggaggggcaggaaagagggctataagggcagcggcccaggcgggcgggatccaggcgggccatggcggatgtccccggggcacagcgagcggttcctggtgacggcccagagccccgggaccccctggactgttgggcctgcgctgttcttgtaacagcccagaatctgctggtggctgccttcaatcttctcctgctggtgctggtgctagggaccatcttgctacccgctgtcaccatgctgggcttcggcttcctctgccactctcaggtgagcgtgcgccccggggtgtgcgtgtgagtgtgagtgttggtgtgtggtgatgctggcggtggggtctatgggccacaacttcaacccgcctgggctgtttccaccccgtgcacagtatcgcctggtcggcttgggcctgacgcctcttctcccacagttcctgcgctcccaggcacccccttgcaccgcgcacctgcgggaccccggtttcacggccctactggtcaccggattcctgctcctcgtgccgctgctcgtgcttgctctggccagctaccgccgcctctgcctgcgcctccgcctagccgattgcctcgtgccctacagccgagccctttatcggcgtcggcgcgccccgcagccgcggcaaatccgggcctcaccagggtcccaggccgttcccacatcaggaaaggtctgggtctaatgaccctcgagtcaagaacaaccctgacggctgccctccctcttattcggcccaaggacttgaagcccggcatcttccgacctgccctgcccccacccctgcctgagcggagtcctagcatccccttgggagcagcagcgtcagtggacccagtgctgagaaaagcccccacatcccggaaaacccactttcctttcacgacccacatctcaatcctgaacatctaggctggaacctgcacacctccccctcagctccgtcgtgaatgggacaacaatctcgtgccctcgttttatggtgcagcttctctagtatttctggggctggggggcggggctggaggggaaggagtgtccacgcatcaataaagatttaacgaactgaacgcgctctgcgaacagaggcgtggcacaagtactatcacccctgccctgtgccgaggaacaggaaacatgtgccagggctacaaatgagcagagaggagcatccttgagccccctggccttatcgcttttgtccgttcttcctggccagacctcagagatctgttcctgaccccaggcacctccccctcaatagagtggaggggcccagcctcggccgcctgccgctgctccccttggggacctgagcccgttctctgaccccagcttagaggaactcggtgttgccaggccggggtgggaaacaatgggccttccggagcaggatgacaccccctcccgccacaattctggagcagcagccgtgggagggaagatgcaggggcccaccctggggcctgttggtccgtcattcagccctgccccccatctctacccctgaacttgagagaacctttggcacccctggacatcttggttgggagaggagggttgagggtgctcccgacttcagatgagccctttcctctagggatggggtgtgctatcctgcaccggcatcccagctacacacagacacaggcccattcggtcataagtttaatgaagtctgaaaggtaagcgccatcgtggtcagagatacggaggcccggtcagactctccctctgcacctcaatggaaacgatgtggtgtccgggtaccatggccaggcccagcacacggggctccccggcagagaaggaatctggaaagaaggatcagagcatcaggaaagtaggccagaatcagtcccgcccctctgagccacgaaaacgagccccagaaaacaagggttgcagccaggcccttaaggggaaatgccttgcgtaaggttccgccacattaccaggcgggtgtgcattccccgggcactgacccgacggcttgaggaactcctgcgccgagcccaggatgacattgcagtcacggtcagtgcagaggaagcagccgaccagtgtccgtccatctgtcatgcgaatgcgcatagtcttgttgagcagcgcctctagctgctgtcgggcgcgctcagccgccgagtcctcgcgctctccgtccgaatcctgcgcggggtgtaacaagcgctcagaccgcgcagcccaggctgcccgcccgcggaaccacagctcccggcagcccgcggggcactcacacaaagcccagaggctgccgggagctgcagttccccaccccctccatcttgctgcttgactgcccctcagtcccagaaccagagcccgtgctaaccccagcactggagctgctctgacgccgactgcaacagccattctcttctcgtagcagcatggtcggtccagctccggccatttgcccggaggcctcctctgggcctttcaacttcctaagcacctttcaggttgggtggtccgagatctcgcgagcgctcccgacctctttcctttcgcgagatcccctctcctccccctcctagtctcctcggcaacggcacagatctcgcgagcttctcctacttctctagcgcygtggctcactgaagcgtactacgccrgatgtcttaagatatcgcgagacctttacctctggtttcttayacatcctttagaaactggaatttagcgagaatacattctttcatactgcctcctcccttgtttttctgtctcagagagatagtctgtcctaaatatcccatgtagcccaggccactgaattaaaacggagcgtattcgttctctgccccaccccgcaactcctgaaagcggcgcaactcaattacttgatccttatatgccccacgcgggactcatactacgtttcccgtgaacacgtgcagtccaaaccccgcccctgatatttatctcagtggacggtggccggaaaaggacaatggtttccatgtcagcggataaacgctctcccctcggctcccggacgcgacggaggtcgtagtagtagtgagtacgtgctgaggagcaaaggagtaaccaagagatccagtgaccgacagagcaagagccatgccgcgccggggcctggtggctgggccagacttggagtattttcagcgtcgctatttmacgccggcggaggtggcccaacataacaggcccgaagacctctgggtatcttacctgggacgcgtgtacgacctaacgtcattggcacaggaatacaagggtaagggccacacrttgggccggggccggagtgtgtgtgtgtgcacgcgcgcgtttgcctggttctcgaagggctggcattgacagtggctgtgctgctctyttcwagggaacctgctgctgaaacccatcgtggaagttgcaggccaggatatcagccactggtttgatccaaagaccagagacgtgagttatgctggaacctgggattgtgggtagaggaaatggagagcggggatgggaaggaaaggcggaggctagccagagcctaatggctgctctgacaccctcgccccaaaccctcctttaaagatycgcaagcacatagatccgctgaccggctgcctgaggtactgcaccccgcggggccgctttgtgcacgttccgcctcagctgccctgttcggactgggccaacgattttgggaagccctggtggcaggggtcgtattatgaggtggggcggctgtctgccaagacccggagcatccgcatcattaacacgctcacgtcgcaggagcacacactggaggtgagaactggtgacaaggagcaggttagaaggaatggggaatcccagcaaatctccaggccgatcttcagggcaacattttttccataaccggtgggagtgtattttctgtcctttacattgaggcaactgaggaaagcacagcacctaggtccccagggttgggaattctaggagtgtctgggtcacagggggacaagagactcctttataagcctgggaacagcagttcatgtatcttagtgatggtggtccttcgaagctcttacacgccgttttggacagcaattggactttctttttaatctactctgttgcatggatatagtgaggggacagttgaccctttatggccatccggtagttagaagtggctgccattaagatctgtaggactttagggtctgctcattgcatgctggagtttcagcttttttttcccggggccgtagagtacctgaagctgctatctgccaagggaggcactttgatcccagcgtgtgtatatgtatactccatccagaattctgggggtggggtgcttctgtgttctccaggtgggggttctggagtccatatgggaaatcctacaccgctatctcccctataactcacatgctgccagctacacgtggaaatatgaagggaagaacctgaacatggattttaccctggaagagaatgggatccgggatgaggaggaagaatttgactatctcagtatggacggtacacttcacacacctgcaatacttctgtacttcaatgatgatctcacggagttgtaggcaaggagatgtacactcgtgtagactcaagacgtatttcgagtttggctttttctgtgccttgaggaaaagtggtggggccgaggggtgcctggacccagatctccactcctctccaggagctagcctgtgcccttytgaagtgtaaaggccctattccctgccttcattacagtttgctctgagaaaattagtgaattaatctttgggaatgatacaagaagatcaagtaccttggtttagggagatgtagaagaggatagtcagagttcaggcagaactgtttgatagttaagagagagtagttctacaggggtgagggatggaaggacttttttggcaatgatggaaatgagatgtctgcaggaagatgggatttacaaagaaataggaaatgtttatcattgaccatacaaagctggcttatcttacttgtagaagagtgtttggcagctgaaacccaagggaaagaaaggaagtgcgtcattataggcaattcaggctagatattatactaggtacttcatataccctcttttttttttttgcccccaacaaagagaaggggtcttgctctgtcacccagtctggagtgcagtggcaaaatcatggctcactgcagcctggagctcctgggcacaagtgatcctcccatctctgccttgagtagctgggacttcaggtgcacgccacaatgcctaattttttaattttttgtagacacagggtctcgctgtgttgcccaggctggtttcaacctcctggcctcaagtgatcctcttgcctcagcctcccaaatagcctcttcaagacaactaccccataaggtggattaccattactatgttacagataagtccttcgaaactttggaaagtttaatagctcaaagccacactaggtagtaaccactagagccagaatgcaaattcaagtctgcccaactccaaagtccatgttctctcaatataaagggaccatctcaatgtctaatctcatgttaacatttgtagccactgctctcagcaagtatttgggatgtggctttgtcctaggatccctgcacaataggaaattgtggtcctattgtatagtttgcagttattgtctctggaagggagtttgcagagttctcctgtggcgaagaggaggcaaggaaggctaagtgtcagttaagcaatagctattggggctacttctttgttaatcccataccccagatttctctcctgaccttttggggcaaagaggtgggtatttactaacttgaaggaaaactagagtggggaaaaggccggcaaattagtgacactttggcgagggagaaaaaggaggcagtttgccacttggagaagatgaggaagacagggttgcaagacggtgactccaaaagagggagctcgacaggggtaatgtaaacagagatgctaactaagtcagaaaactctcctggtgaccaaaagagaaccactattgggggtaatggctagatttggtctcctttaacttaaggaggggagatttgagaatgacagacagttgaacttcctggcagcagcaagcaaaaaacaaatcaggaagagtttagtgtgtcttctggcaggggacaccagggcccagcacaggagaaggtggcccctgtgagatactggtgggctatataggcgttttctgaggggctttgggaggcatgaacaaaggtggaaacattgctgttggcttcggcagtatctgaatttactgtgagatggagggtttaaatctaaccccatggaatgcaggagtccatgaattatctaaatcgatcattttgatctttaatcaactctgcaattatgtgtaccttgtttgctcaattaaaccctgaactatttgagaatgaaagctatgctgttcctctagtgcaagcctcagggcctgtcctgtgcctacaggatgtccccattctgccaaaacctgtccctcttccagagactcctacttcaatgtctcttgctagaaacacatccctttcctcacacatccagtcactcatcaagtgtaatctgtctcctaaatatctctggaacctatcttcttttctccaagttaccatcacctcttgtctaaactgctacggaaacttcctaacctgttctcccatttccacttctgacttccatgctgcaatgagagtcagctatgaaaaacaaacctaaacatcgaactttccttagcttcttcagtggcttccaactgcttttggaataaagtcctaaattcaaagatcttgtataaatcaggctcatctcgcaacacccctctttgttctctatggcctagacacactggctttcagttcattacatgtcttgcctcagaccctcacacactgtcctctctgcctgcaacactcttcctttcactttccacctagctgatcctaaatgttccttcctcagggaggtcttttctgatttcttggtgggtcaagactttctgataaatcagttagcaccatgcattttccagagtttttattacaattgtaaaattatggctgtaataggctggctgcgctgctagattgtaagctcacgagggcagagatcttgttcacatcttgctcactgctatattctcattgctgagcacacagttgcagctcaataaattttgaatgaactccaatgttaagtgaactcatccgtctatacctagtgggggggatgttgtgtcctagtaggcaaggaaggaccaagaaataggatgtctggttcctgtgctatagtctctatccataggattcactttccttgcttccccaatatccaaaaccaaaagttattccatagagggtctctggccaggtgcagtgactcacgcctgtaatcccagaactttgggaggccgaggcatggggatcacctgaggtcaggagttcaagaccagcctggccaacctggcaaaagcctgtttctactaaaaatccaaaaaattagccgggcgtggtggcacacacctataatcccagctacttgggaggctgaggcaggagaatcgcttgaacccgggagatggaggttgcattgagctgagatagtgccattgcactccagcctgggcaacaagaacgaaactccatctaaaaaaaaaaaaaaaaaagttaaaaaaaaaaaagagggtctcaccagatttttgggggccaatccatctgtcatttccccatatggccaccaggtggctgtaattacctatagagtcagggagacaagcctggagggaaaacccttccaaagttaggatgggaaggtggcccttggagatttataagggggagggaaggacaagaaaacaaggaaaaaccacatggccaccgttctattagcattaggtttatgcctgcttttttttctctcacaagcacatggcaggaaaggagtgcagttaggaattcatgggctagaacaaaaaggaggtcctgattacaggtatgggagtgtatggggcaaagtatggagctgacaaagggataaagacatcacaaatttttaaaataatagaatgcattcacttattaatacttaaaaaaaatctttccagtaggcactgctttgttctctaaatagccaagtggatatttgcatgaggagtatgtaaataatgctttagcctaaaacccagaaagcaaacagaacatgagtgtagggtccaagtcctcttgtggtaatctcttttgtgttagagggtggtgggtgaaggatggaatgctgaagggaaggctgccgtcctcagtgaatcacagcagcttcaaaggactcaactggcaagatttcccacaggtgaggtccctacatgcccacattactgggggtcataaagaggcatatgttccttgtaggaagcttgcctgctcactgggataaagcatgcacacatgaaaagataaatgaacatagtacatgataaaggcttaagttatggtatagaaaagtttctacccttacagcaagtcacaggtggattactaacctggccatcctgaaactgtttctaaatactctgtgtgtgtgtgtctgtggatgtgtattatttttggaaaatggtgctataatttccatcagattctccaaatagcccaaccccctactcctactcctgaaatagcacgcacacacacacatacacaacaatactttaaacagcctcaaaagtaaaatatcaaaagttataatacaatgtggtcccaatattctggcatctgtctcaatggtctgcctcagcctgtggcagaaccatggcaacccatggcagaaattcctaaagctctaacctttggggctaaatttatgacgagtctcaagtgttttactactgtaccaaatgttaatctggctgtaccttggagctgagtaaagggatccatcatttggtcttgatactataacatccaatcatacatcacgataaggttaatgcatccagcaccacagctaagtttagggaggccacatggatgggctgctgttgggagaacagccacttgatcatgggtcagtagagtacacggtttggctgtaagaatgcacacagaattagaaacctgactgatctttatcctggaagccaaagattaaggattcaaaaatacaaatggatatgcaccccaagtactaggtattctaggcacaccggaagcactaaaaagaaaaacccaaaaagctggtgaatgaataagtgaagcgaatccatcaaagtgggaatgggagtaaaggcttaagtgcagtggtgtgatcatagctcactgtaacctcaaactcccgagctcagacaatgctcctgcctcagagtagcaccaccatacctggctaattctttatttttttgtagagacagggtcttcctatgttgcccaagccggtctcaaactcctcgcctcaagcaatcctcctgcctaggcctcccaaagtgttgggattataagtatgagtcaccgtgcctggccaatattttaaataattgtgtgcctggactgggtgtggcagctcacgcctgtaatcccagcactttgggaggcagaaggatcacttgaggccaggagttcaagataagcctggccaacacagtgaaaccctgtctttactaaaaatacaaaaattagccaggtgtggtggcaagtgcctataatctcagctactcgggaggctgaggcaaaatggcttcaaaccaggaggcggaggctgcagtgagccaagatcacgccactgcactccagcctgggcaacagagtgagactccatctcaaaaaaaaaaaaaaaaattatgtgcatgaagcaaagtttgtgttaggtacttgtgtgtagaattttctacttgtggtatcatgtaggcatgtaaaagtttccgatttaggagcattttgggtgtttgattagggatgctcaacctgtacatacacatacctatatataaacatattatgaatagagtgaaagtactataaagacacacagaatcacgagagcgatggctgaatgatcagaggcatgtctgaggagatgctcacatgactcatctgtattacctgtagagctgcatttaccaacattaatcctcccaacaaacttaaggcataggtacgatttttatttatactgaaaaacaacactgaagcagagagagattaagtaacttgccaaaagtcatacaactaatgagtaccaaggtagtcatagcccatccaactaacataccgcctccctgcatgtcaaacataggatgctattctagttacctaccactgctgtattttgccaatgaatctgcaatatgggtagggctcagcagggacagctcacttctactcccaaaggggtggactgtggggagctggaggatccactttcaagatggctgtctcacatagctctcaatgctatcagtttttctccacatgggcctctacacagggcagtttgggcttcctcacagcatcccaagagaaccaagaggaagctgaatcatatgacctagcctcaattccaagggaagggaactagctcccacctctcaccgggaagagtctcggaattacactgtaagaagaacatgtgggatgtgagacataattgtgggcatatttagaaaatacaatccaccagagatgcactggaggtaaaaggggggtatccagcccagtctagggtggagtggaggggtggtctttgaagggttgtgtgtaggggagacagggcattgatacttgagcctttcttgaaagcctaggttggaatcttggccctatcatttattcaattcattaaaatgatactgagcatctgtcaggcacagtcctggaaactgtgaatacaaaaattaatgacacagttcctgccctctaggagcttacagtttaatgggagactcacggaagtttgtgattctcttaatttgtcatcctgcttccttatttacacagtagccatggggaactttttttttttttttttttttgagacggagtctcgctctgttgcccaggctggagtgcagcggcacgatctcggctcactgcaagctccgcctcccgggttcacgccattctcctgcctcagcctcccgagtagctgggactacagatgcccgccaccaagcccggctaaattttttttttttttttttttttttttggtatttttagtagagacggggttttaccgtgttagccaggatggtcttgatctcctgacctcgtgatccgcccgcctcggcctcccagagtgctgggattacaggtgtgagccattgcgcccggccgccacggggaacttttaaagttcccatgttaaaagtcttcaaaggcaacctacttctcttaagatgaact

SEQ ID NO: 96117 - DNA, 35874 bp, Homo sapiens
  misc_feature (1)...(35874): n = A,T,C or G
gaaaactggaaaaggaggaggagttagacttagtacagaaatgatgtgggaaccgaagcaagagaattccaaaggccaggttaaaaaaaaaagagatggaaaccaacacccaataaagtgcattagtgtggggagtggaacattaataaagaacattttagcttcataaacaaaaatgtgcgtcatcttcccagtcactaatactttctggttgctgcccacctacccctccctctcagggtgctcctgagcaccgccgaagatgggtggccagcagttacactggagaggtagaggaataacccagagagaaatgattccacaggcatggaatgggaagcaagggaaggggcaaagggagatcaaaggaatgggaggaagctagagtaagaaagggtcaacaagaatgaaagagggtagaactgagctatttgccctccttcctttgctccatttggcaaggatcattttctgtctagacctctctgggcaaatctctgtatgagaaagctactttgggactcctttccaactgtccaattcctggtaccactttaccataaacactggggtacagttggaaatcacaggtcagaaagttagatgaaaacgcctgggtataacccctacctctgctttttctcagttccagctcctttctctttcacggtacctcagttgcttctactttatcggatagtgttggagatcatggagggaaggcaaatatactgaaacggaagaaaagagaacataatttcacgatcttcagatttkactctttcctctttatcctaaaaatttgttgtttaccccccaaattaatttctcaagtcagttgaattttacattctaacaattggaggaggggaaagcgagggaaaggggaaaagagtaaagataaaatttataacaattataaatcactgaaaaggctgggtaaaggggagaatcaaacatggactcctttgaaaaaaactcaatcatcgtatctattcatatctctcccccaaaagtcactaggatttctatcactttttttaaagaaagcagaaaaaaatccagtcccgcttctcatttaaaagatatgtacacaattaaatgcgttgtgacttcaatgaggtatgtagaaacagagttatatataaacatatatttcatctttttccttttcaatgcctgaaggggaaaaaaaccttcacatcaaaccactcccttctgaagtattcaaaaaaaaaaaagcttttctttagagaagggaggtggggaggaagagactagtaaagaaaataaaaaaaattaaatctagttggactagtatctaactagttaacctttaacaatttatgctgatgtcagactgagcatgagtactgattaatgccccccctcaaatattttttataaggggggagttagtcacagcagccatttttgttttatgcagaaatccttcatgcccccccaacacacacacacacacacacacacacacttcagtacacaaggaaaatatctctattaatctgtgcactaatcagttatgaaaaaggagaaatttgtgggtttctgggtaaaggcttggagatgggggtgtaacagggaggagaatgggggggtgaaaaatgaaatattaagccagccattttgtttgaaaaggggattttcccccctctccctttctttatggagggggtggcggtgctggagggggggttgttttaaaaataatttcaaggcggccatcttagtgcctcagctctgagaaatatttctgagcgcccccctcagaatttaaatatatttaaagcaacggagaggggggcagagagaagtcgaaaacttttatatatatacatatatatatatatatatatgtatatatatatatattttaaatccccctttcttgttctcttgggaggaaagagagaaggaaaaaaagtctttcctcaattttttccaagacaatttttgggggtggtttggcccccctcctcagacggcggccccgagggtgggggtttcggaggggggtggcccgggggtttggggggctgggggaggcggtgaggaggaggaggacgccgccgccgaggaggaggaggaggaggaggaggaggaggaggaggaggtggaggcggccgacgaggacgatgaggaggacgacgacgagggagtactcgggcgcgggccgggccacgaccggggccgcgaccgccacagcccccccggctgccacctcttcccgccgccgccgccgccgccgccaccgctgcccccgccgccgccgcccccgccgccaggtaagcggccgccccgactccccccccaagcccgagtgggagccgcgggcgcgcgaagccgggcgggggcgaggcacccaccgcgcggccgagccgaggcgaatccggagcgcgaatccggggctcgggcccgtggccccgcggcggtccgggaggtcggggcgggcggtggcggctgcgaccgcggggccaggcctcctcccctcccccgccgcacccctcccccgccgccgccgccgccgccgccgccaccccggctggagagcgctgggcgcgagctgcgcgcgcggaccgggccactcggtcgcggctttcgggggaggaggaggaggaggttttttttttaccctcggcggggagggggtaggcaggaaacggccaaggcgaagccagggccccctccctggccgagcgagggaccgccgagaccctggcggccggacggcggcgtgggggaggggcacgtgggggaggggcggccgcgcgagcgcccctcgggctctggccccggtggggttggaccgagggagagtggggtttccccgcacggagcagccgacgggcctgccccctccgctcaggacttggacaggcagagtgaggacggtgtccatcggacccccctccacccgcggagacttaggtgcccagaaactgaggggcatgcggtggcacgcgagggaggggtcttgtgaatgtttgtgggctgctgatgagtaggggcaggtggtggccacagtccacgcagaccacttcctggaataaggcaggagctcgtcccctcgctcccccagcctgtgcagggacagcagtccattcggattggggagcggagagaagagtgtctggggaaccagatacccccggctccacccccttcatctcgccggggctctgggctcttttgtgtcaagtgcggtggggggggtccccctcttgaccccgtcagtctggggtggccaagctgcccagctgtgactctcacgtggctgccattcactgtcactcactctctcgctgaaaccacccactccctgagcacgttggggggcgtgaactgcccacccagctgttctgcagcttgaccatcactcagcacccgtcccccgaggtgacaagtcacccggcggcactctctgggcggcgctctccagaccgctgcgccgcgtcaggcgcccagcggtgtccccctcagaccaccctcctagtggagtgatttctagtcttctttgggataggtgagcatctgggtgtccacaccccctgcttggggaacagcagggggacctccgcacccccgggcctctggctgccatgcggcacaaatgcaccaaacttcaaaacggccaactccgggctctytgtaaaactgtcatattgatccgtgtggcttctgtggcaaacgttcctgtctagccgagacgacctttgggggagcggggggtgctttcttgtgggtcggggagggatgtgtgtctcctggaaactggataaagtctccccgccccccaagcttgtctgaaaaagggtaaagttttgaaaaagttctcccagagagccccctgccttggcaggaggaggaggaatgaggagttgtggggagagggtgcctttggggttgcctccggcagaggcgctgaaaagagggaaagaaaggccgtcaggtcctgccaggggcttggcagcgctcacctatttgtattgggacttggagtctggggtggggtggtgtgggtcccggatctgggtacgttggggagagaagcgtgaaaggatccgaggttgagatgggtctttgtgtcaacccggcctcccctttccctcttggctttctgaatagaccagaagagacgtcagaggctgcttacattttacaactgaaatgaaaacccacctcccctctccccytgggcaatttttatctccctttcagccctccaagtcgaatgagtgacccagatacaccccctcagatgactttcggaggtaaaacttcgggaaattatttttagcacactcattatttctgtctacctaagtgtggggaaaagaaccctcctctaaggaaatttgttcaggctgccctcgctcttccttgtctagagtatgcatttgtgcacaggagagatttccattgttttccattccgactgctttgattctcaccattttgttttacattcttactcaagaccaattttatcccttccccctctctccagtctccttacattgttaaacgtttaaaataatagcagtcgtgttggtgggggaagggagcaggaagccaaaaactcatttcttctccctcccccttctggcaagtcgagagaaataatataacataatatatagatgtgattccttgggggtgggggtggggaatgattgtgggtggtgcggaaaattctggtagtttctttgcaaaaggtctgaaaatacaaacccaccccctgcctgcagtacgcatgtgcagcagacctattatggtggtgcgttgtgggggagggaggggaatttgagaaaaaataaatatatgtgtgagagattgatggtgagattagaagaagagaggggcgggcgggaggcgaggcttcggccgagactcctcccgcttgctcgggcggccaggctccgccctgcgccctccggcccccgcctctctcctccctgcctccctgagatccgagccggggatgtgggagagtctgggctccaggccagcattgagtggctgctgagaccgaggttgggacttagatttgctttattacccttccttgcttttccttgccgttctcgctttgcctctcccgccaccgacgcctgcccaagttcgggaacctcccgctggggtggggagtagagtgaaccggcttgtgcaccacccctggctggtggtggccgaggccgtgtccctgaaccttagccagttggcctgcccttgccactgcctcggcagcctgcgtttccatgttcaagtcaaccgaagtccctggggccagggggagccggctgctggggcatggcgccttccttgctgacttcctattacagtccccattccgtttcacacccgggctctggcagccacccccctgcacacacgcacacagtcctagagtgtcttcctgcacaaggggacacaggatgctggagttagcaggaaaggtggcactgaaggaaggcgaggcagcgactctgaggcagtggaaacggaggcctctggtgttaattgtggctaattttccgttggctgttgagggaaggagaaaggattgtgtgtcctagagctaggggctgggccaagccsaggctttcccatcttgcatcggctgcctctctctgtactagacaggtctggctggttagtctagtgcttggtaggggagggacgtgaaccagagccccagggccccaggtctgtggggcatcctgtcttcctttatgtggggtaactctccgttccgttccccaagccttcacagagtgacaccttcacagataatggggtggggggcctggggtcctctggcagagacatctggggagaaagccagggacctatccctgctgaagcaggtacaggccatcctctggatttgtgggcctgagagtgtgtgtgggtgtgggtgcgcgcgtgcgcgcgcgtgcttttgagaaggcatatgctgggtgtgtctgtctgtgcctatatctttgtttgggtctcccatactgcgtatagatgaatgggtcaggatatctggaacaaaatatggaggtgaagggtgagatcgggaaacaaagggtatggccccctagttcccaaagggagcagggagatgggaatagaattgaaggtaggttttaggctacttgggaggaggaatatttaggtaattgtggagactttctcctgtgtgatgaaggyggcagacactgtgatcctgtgggcaagaagtaaaaatgaccagctgaggatttcttttyctccaggactgtgttggggtgacaggatgcctggtaattatccgaggaaatgtaaatagaggcctccctcttggcaaaasgatgtcagggccccagggtgttagtgtgagaacccaggtgtccacctttggctctccctccccagcatctggcttagggagctgccagcttgtgtctccccactccaagtgctggggtcaggccaggccagcagctgggcatggcttccccagttcctgggcaggatgccagctggcgaagtgagggggaaggcaggaggagccctggcggtgactgaaaggacctgccacagtcagagcccatggcctggagcctggtctcttgttagtaggaggggagggaggggagtggtttggctgctcttctcttctgacccctgacctcccattcagaaccagagcatcccagagtactcgaaacactttctgtttgcatccagtgaagggaggcagggcttggaggagttaatgcttcctagagagtgggaactgccgaggtggggaaggggcaagttgaggggcctcagaggctggaaacctagaggcttaggttttctgatgctttttgcttcaaagataaggatgacattcggctgctgccgtcagcattgggtgtgaagaagagaaaacgaggacccaagaagcagaaggagaacaagccaggaaaaccccgaaaacgcaagaagcgtgtaagtgtcaagaattcctaactctgtggcaaggctcaagagacccattctcagagacctacattttytctggtcctgattactggtgtgggggtggggttctgaagccagggaggcttgatcccccgggccccccacttccctgccactgttggcctgtatctcagggatctgggaccctaacttcattcactgcaacctagtgaagagcctcgttgtcagtgtgtcctcagcagcaaagagaagcagttgaaagcacaagctctggaagactkatgaattcaagagtccagcattcctctgtctaggataccaggccgtttatttggctctctgtgccttagtttcctcatctgtaaaaagtagataaaggccggttgcagtggctcacgcctgtaatcccagcactttgggaggctgagccgggtagatcatttgaggtcaggagttcgcgacaagcctggccaatgtggtgaaactccgtctctactaaaaatacaaaaatcagccgggcgcggtggtacgtctgtaatcccagctacacaggaggctgaggcaggagaatcgcttgaacccgggaggtggaggttgcagtgagccgagatcacgtcagtgcactccagcatgggtgacagagcaagactccatctccaaaaaaaaaaaggagataaaaaattagttactatcacaggattgttgtgaagattaaaagaggtaagatatggtatgtgctgagaacagtttctggcaatggtagggatgaataaatgttatttttatttctttctcttaggacagtgaggaggaatttggttctgagcgagatgagtaccgggagaagtcagagagtgggggcagtgaatatggaaccggaccgggtcggaaacgaagaaggaagcaccgagaaaaaaaggagaagaagacaaagcggcggaaaaagggggagggagatggggggcaaaaggtgagtagaattagggaatgagagtgagaaatctgcattaaagacgggcatgaggaggggaggaatggagactggactggagaatggggcaagaagcaagaaagcccagggaagctagtgggtaggtagacaggcctgtgtgsggcctggaataggggctggaggagcacctacttcaccaaagcccctctcccgcagcaagtggaacagaagtcatcagcaactctgcttctgacctggggcctggaggatgtggagcatgtgttctctgaggaggattaccacacgctcaccaactacaaagccttcagccagttcatgaggtgcggtaagactggggaatcctcgctaattgacacttttaatttgagggaggtcctggaccccttggaatctgatgaaagctatgaaactgctctccagagaattcacggtgtatacacaccaaattctacacgtcatttcagggaactcctagactcataaggatccaagaaccccagttgagaactcttcactgaggggcgaggggtggaggggccatcatgattccagtgctgggttagagaactctttagcaacagaataaagtgaggacagaatatagtgagccctcccctgccccaacagctccatcttctgctctgtgacttctctctagactggacctgagagataccatcagtgttcctgaacttccttagctcacttagcaggtcctgtgccccttccttaggccctggtaataatggagggtccactgctggcagtgggacctgagcttcagtggctcctgaagaaaagtagagaatagtagagtagaaaatagcagagatgggccaggtgcagtggctcatgcctgtaatccaagcactttgggaggccaaggcaggtggatcgcctgaggtcaggagttcaggaccagcccatccaacatggtgaaaccccgtctctactaaatacaaaaaaattagctgggcgtggtggcacatgcctgtaatcccagctactcgggaggctaaggcaggagaatcgcttgaacccgggaggcaaaggttgtagtgagccgagatcacaccactgctatgctctagcctgggcaacaagcgaaactccgtctcaaaaaaaaaaaaagaaaaaatagtgccgatgtattttgttttggggagaaggcactttaacatatcagttcagtgctctggaggcagctgctgaggttcacatctggttacattttgggcaagtgactgaacttcttcaatcctcaatttcctcttctataaacggggaataataatatatacctcataggaatctgtgtgggtttggtgggataatgaatggaaagcacagtaccgtcagtgcctggctcctagggagcattcagtaactggtgactgtcattagtaacgttgtctcacctaccttactgctgaacttggggcttttctcagcaccatggatcacccrtgtccgcacaagagttgagcaccccaccccagagcagaaccagcatggtctgactctttcacactccgtcctacggaagcccatcttcagggcccatggaacttactagtaaaatgcagagaatcatagcaactcaagagtattattgtgaggacaagataaggtggaatgtatgtgaaagggttttatgaactgtaaagtagtatacaaaagtaaagcatttttgttgattttattttaaccttttatgcttttaagttttatttcgctgttttttatttccccttttttttttttttttttgagatggaatctcactctgtcgccaggctggagtgtagtggcgcaatcttggctcactgcaacctctgcctcccaggttcaagcaatttttctgcctcagcctcccgagtagctgagactacaggtgcgcaccactacrcccagctaatttttgtatttttagtagagacggggtttcgccatgttggccaggatggtctccatctcttgacctcgtgatcctcccaccttggcctcccaaagtactgggattacaggcgtgagccactgcgcccagcctatttccctttttttaaagacagggtctcattctgtcacccaggctgcactgcagtggtgtgatcatagctcactatatcctccaactcctgggctcaagccaccctcctgcctcagcctcaggtgctgccacacccagctaattatttttttttattttaattttttgtagagacaggatctcactttgttgcccaggcttatctcatagccctgggctcaagcaatcctcctgcttcagcctggaattacaggcatgagccaccgtgcctggcctgtatttcttttttaatgcttttttaaacctgttctttccccgctttttttaaacttctttttatttatttttttaaatggctgtttttcctaataggacatattctcaccacccaggaatcctagcatgtacatagatttaattgatgaggggagatggcagtgttcccagaccatctgtgaagggtccgagttttctgcttctatatttacaggcccctaattgctaagaagaatcctaagatcccaatgtctaagatgatgaccatccttggggccaaatggagagagttcagtgccaacaaccccttcaaggggtcagcagctgctgtggcggcggcagcggcagcagcagcagcagctgtagctgagcaggtgtcagctgctgtctcgtcggccacccccatagcaccctccggaccccccgcccttccaccaccccctgctgctgatatccagcccccacccatccgaagagccaaaaccaaagagggcaaaggtagggaactctcttccaacaactgtcatctcaccttccaaactgcatgtcttcacattagagtctggaactctcgccttcccagccctgattgctggaggagagatgctttccaggaagtggggcttagtgaaaccacagcccacagaggaatccagaggcccctgtgacctccataattccaggatgtcatgacctctcctttttcctcttctcaccccgactcctcattcaggtccaggccataagaggcggagtaagagcccccgagtgcctgatggacgcaagaagcttcggggaaagaaaatggcaccactcaaaataaaactagggcttctgggtggcaagaggaagaaaggaggctcggtgagtgacccgtccctgtctactaaacacctgggggccaaggatccagagacagggatccgtgagggccaaggatccagagacagggatccgtgagggatggcggaacaggaagccaaaggcctggggagggcgtagaatgaagtctgcctcactgacggccacggggctatgggcagtatgtttttcagagcgacgaaggtcctgaaccagaggctgaggaatcagacctggacagtggcagtgtccacagtgcctcaggccggcctgatggccctgtccgcaccaagaaactaaagagaggccggccaggaaggaagaagaagaagggtaaggagtgttgactgtgtgtgatcctgtcagtgggccgtcctctcattcttattttcaattttgacttctctcttcaacccttctccctctctctctccatctccccctgccctgcttccttatccctccaccggggtatatgacagtcctgggctgtcctgcagtggccggggaggaggaggttgatggctacgagacggatcaccaggattactgtgaggtgtgccagcagggtggggaaattattctgtgtgacacctgccctcgtgcctaccacctcgtctgccttgatcctgagcttgaccgggctccagagggcaaatggagctgccctcactgtgtgagtacctaatgccagcatctgatggccctgaggaacccacccatctctttcccccttggtttcacttaccctcttcctgcccccagatggctggacttcttagtaacagatgtccgagtgtctaggatcctaatgtattcctttctcccacaatcaacatttctgaaactggagtgtccttttccttagttcccaccagtcttctctgcacttctaggattcaggtgtcctgtctttgcctgtatcttccagtttcattccttaatttcttccatctgtctgtgtgtctatccttggccccctaggagaaggagggggtccagtgggaggccaaggaggaagaagaagaatacgaagaggagggagaggaagaaggggagaaggaggaggaggatgatcacatggagtactgccgcgtatgcaaggacggcggggagctcctgtgctgtgacgcgtgcatctcctcctaccacattcattgtctaaaccctcccctgcctgacattcccaatggtgaatggctgtgtccccgatgcacagtgagtggaaacatctcccctctgtatttactgtcaggcctgatcccttcccccatccctggggcccacatgtccagcttttcatttctctgcactcccccacccttgtgggacccctatcttctcatctaacaatgggttctttctgcctctttctttcctcctccttgtacgtgtccatcccaaagtgccccgtgctgaagggtcgagtgcagaagatcctacattggcggtggggggagccacctgtagcagtgccagcccctcaacaggcagatggaaatccagatgtcccacccccccgtcctcttcaaggcagatcagagcgagagttctttgtcaagtgggtaggactatcctactggcactgctcctgggccaaggagcttcaggtactaggaccttttctttccctctcccccatgacctcatttcctrccatcctctccctctcttactcctctgtttgttgggttcccatactctttgttttctctcatttcaggcctgtggccttcataccctacttgcttagtttccatatgtggttcttttggtctacagtcctctttctctcagtctccgttagcttccttccctcagatatagcatagcctttcctaacttcatgtccttccttatctgtctttttccatgttttataatattcctggctgggcatggtggctcacacctataatcctagcactttgggaggccaaggcaggaggattgcttgagaccagcctgggcaacatagtgaaaccccatctctgtttaaaaaaaaattctcggnnnnnnnnnnnnnnnnnnnnnnnnnnnnnnnnnnnnnnnnnnnnnnnnnnnnnnnnnnnnnnnnnnnnnnnnnnnnnnnnnnnnnnnnnnnnnnnnnnnnnnnnnnnnnnnnnnnnnnnnnnnnnnnnnnnnnnnnnnnnnnnnnnnnnnnnnnnnnnnnnnnnnnnnnnnnnnnnnnnnnnnnnnnnnnnnnnnnnnnnnnnnnnnnnnaaaaaaaaaaaaaaaattctcaatgtttctaatcccattccctatctcttgcttgtaagagccccacccaggccttgtcttctgaaactgttgcatctgtttcattttatttattctccgtcttggctttgactcatttatctctaatccatcctttttctttttttttctatttttttttttttttagatggagtttcgctcttgttgcctaggctggagtgcagtggcacgatcttggcttactgcaacctctgcctcctgggttcaagcgattctcctgcctcagccactcaagtagctgggattacaggcatgcgccaccacgcttggctaattttgtatttttagtagagacggggtttctccatgttgatcaggctggtctcgaactcccaacctcaggtgatccacctgcctctgcctcccaaagtgctgggacgcgcctgttattctcttattgccccggctggagtgcagtggtgtgatcttggctcgctgcaacctccgcctcatgcattcaagcgattctcctgcctcagcctcctgagtatctgggattacaggcgtgcgccaccacacctggctaatttctgtatttttagtagagacggggtttcgccatgttggccaggctggtcttgaactcctgacctcaggtgatccacccgcctgagcctcctaaagcactgggattacaggcatgagccaccgtgcctgggccaatccatcctttttcatagctccctttccctgtcccattcctcctgccggcctcttcccggttccttgttgtcctctgtgagtgtcaggactatctctttcccttttttctgtgccctgctagctggaaatcttccatttggttatgtatcgaaactaccagcggaagaatgacatggatgascccccacccctggactatggctccggcgaggatgatgggaagagcgacaagcgtaaagtgaaagacccgcactatgctgagatggaggagaagtactatcgttttggcatcaagccagagtggatgaccgtccaccgcatcatcaaccacaggtgaatcctcggtccctgggaagtcagacctggtatatgacattattcttaccatggtgatggccccatgttagtatttgctgattaaccaggtaattgatctaaccttgataacctctgctgtagctccagcctttctggccttgtttcctccaggggaacgggagaaaacaggaggaaaatccggccaggcagtgcctcttttgtcctttgcctcctgtcatctccagtggcataagacatagcacatgagtctggggatgagggcatgaaagcaaaacatgagagacataattcatccagaccagtgttttgaatgtttcttcttcatagtacttattactgcctaaacttaatggtatgtatttagttatttcaatgctgccttccccacgagactctgagttccatgaggaaaatacttagtgattaggtgaacaaatgataaggagggatctccaggaatgttttgtgatagctgatttttaggataccatcctgagaaggttaggctgctaggtcaactattccaatctcccttccagcagctcactgttgacggttgggtgacaaattttgtgtgtttgctgataattgcgtttctcaggccttctttctgtttgtgatctgtgcaatattttcctcctgctcctccccatggcctcctgccccacagtgtggataaaaaggggaattaccactatctagtaaaatggagggacttaccatatgaccagtccacgtgggaggaagatgaaatgaatatccctgaatacgaagaacataagcaaagctactggagacaccggtgagggaatgagcttgtggattcaagggattctgacgatgagggcatgaaagccaaaactccagcataaaatgagggtacagtagggmctgattcaacctggagttcagggcaatggccacctgagctgggttgtttgagataggcttgctaaagaggtagtgtaaggaacagaaacaagatctggctgagtagtggagaagaggatgttcaagagtggggagggctggctcttgaggtgaaatccaaagggcaagggtaaagagcctgggaaaaaggaaatatgggaaaatctaggtcatggacagtgggaagtaggtctggaatgggttcagaaaagaaagcgtaggactccyaaggatgaggcctcattcagacccactctttttccagagaactaattatgggggaagaccctgcccagccmcgcaagtataagaagaagaagaaggagctacagggtgatgggcctcccagttctcccactaatgatgtgagtcctctcagttgtcatttcttgtttctggagtgatggtgatcgaagattttccaagggctactgatggaacttcccagagattcagtaacctctgtgaacagtagctcttccttcagcatccagtcttgccccaagagtggctaagaattttggcctgaaagggcaggagccactagagatagcccactggtggctctgtcaccagctggcccttccccatggtgctgctggatattgtcttaaggaatgagggggaggggctgaagactagatgtgagaacttttgtaaactcaggccatagtagagggaattgtaatccaacttggtatccatgccagggaggaagagactaagactggaggagccgccgactatttccttgagctttctgacttcttgtctctatagcctaccgtgaaatatgagactcagccacggtttatcacagccactggaggcaccctgcacatgtatcagttggaagggctgaactggctacgcttctcctgggcccagggcactgacaccattctmgctgatgagatggggctrggcaagaccatacaaaccatcgtcttcctctactcactctacaaggaggtgctggattctaggaccttgaaggggaccgcctggactggggaagtggggagggggaagataaaggggtgtagctggcagaggactagggtatacggcctctagcctagacttatgctgcccccattcttgactcccagggccacacaaaaggtcccttcctggtgagtgccccactctctaccatcattaactgggagcgggagttccagatgtgggcacccaaattctatgtggtgacatacacgggtgacaaggacagccgggccatcattcgtgagaatgaattctcctttgaggacaatgccatcaaagggggcaagaaagcttttaagatgaaggtaagaccctctacctcatatcctctgagaccctcaaagctgtcacttctttttctcagccaggaattcagtttctctattcccctcctcacctttctcctcttcctccacctgtcctcctgtctctgcactaccatcctagagatatggcaggtactcccaggggcatacatggatctgtcggtactggaaatgtgggcagaggtttaggagccatggtctgtaatccctgcttggagaacagagtaatggctcctgttgggagccacagtcaggacaaggtgtctggttctggaggtgtaggtgcatggttgtcaggtggcagctgaatgggcaataattatgttggcagagggaggcacaggtgaagttccatgttctcctgacatcgtatgagctgatcaccattgatcaggcagcacttggttccatccgctgggcctgtcttgtggtagatgaggcccatcgactcaagaacaaccagtccaaggtgagtgaggtttccagacctaaaaaacttgaagttgtggacttcccacttgccttggtcctaaaaaacaacaaaaattctggggattttctgtagtctgggaggacgtccaggttggaagagggagagggccagagatttggggcctctgatcctgagtgaaatgggagctggggcagggaaaggctgatgctgtgggtyggtcacttgtcactaataagcccattttcctgccttgccttgccccatcttttagtttttcagggttctcaatggttacaagatagatcataagttgctgctgacaggaaccccattgcagaataatctggaggagctcttccatctcctgaacttcctcaccccagagagatttaagtaagtggttccctaagggtagttggcagagatgagaggtggagcagataaaatgagctggtagaggattaatctgaggtggtaagtctgagatcaggggcaaggaacttgccgacctgttaattttcttctcttctggctcttagcaacttggagggcttcctggaggartttgctgacatatccaaagaggaccagatcaagaaactgcatgatttgctggggccacacatgctgcggagactcaaggcagatgtctttaagaacatgccagccaagacagagctcatcgttcgggtggagctaagccccatgcagaagtaagatgcaagacgagctgcctggagtagggcttggggattgatgggagcgttccaagtgcaatatcataattgcttcctttatttatgtttcttttacacccctttcctggcctttaggaaatactacaaatacatcctgactcgaaattttgaggccttgaattcacgaggtggtgggaaccaggtgtcgctgcttaatatcatgatggatcttaagaagtgctgcaaccatccatacctttttcccgtggctgctatggtagatacacagagcagggagctgatcgaacgcccattctcagaaaacatgggtggggagtagtggggaggtgggtattgagccacaggggtgsagctgggctggaaggccacggactgggtgtctgagaacaggaggaattgggaacatgtggaagctggatccgggcatctggccttctaggtgtggcaagaatatgggggcatgtttccaactgaccccctcctcctcctctctcctcccttttcaggagtcccccaaactccccagtggggcttatgagggtggggcacttattaagtcgtctgggaagctcatgctgctccagaagatgctgcgaaagctgaaggagcaaggacaccgagtgctcatcttctcgcaggtgacctgtgcccttagctgtctttacatctgcttcctcttccctctcctcatcctccagactttaatttcttacggtcttcctgtggctgctctggtgtgacaaatgaggagattcctcctgtaagagttttttttttttttttttttttgagacagagtttcgctcttattgcccaggctggagtgcagtggcacgatctcggctcactgcaacctctgcttcctgggttcaagtgattctcctgcctcagcctcccaagtagctgggattacaggcgtgcaccaccatgcctagctaatttttgtatttttagtacagacgggatttcaccatgttggtcaggatggtctccataacctgacctcaggtgatctgcccgcctcggtctcccaaagtgctgggattactgtatagcaagttcattcttggcctctgatgcctgttcttaaggttgctggaagttgaggtccagctctagttccttttcagctgcatgagggaagggggagggtgagccatctgcctccttagggactggtattatttcttcatcttattggcaggtgagggtgaagggcacagaccctttggaaatgtgatgaaagctctgggtctactcaccagaaaactgcacatacaatgacacaattttgtayggattttcagggggttcctggatttccctgaaaccttttcatgggtctcagagaacctctgccttaggagaaacaatcttaaatcaagagagtgtgacaagagggccagacgtggtggctcacacctgtaatcccagcactttgggaggccgaggcaggaagatcacttgaggtcaggagtttcaagaccagcctggccaacatggtgaaaccctgtctctacttaaaatacaaaaattagctgggcgtggtggcgcacacctgtagtcccagctactagggaggctgaggcggtaggatcacttgaacccaggagtggaggttgcagtgagcagagatggcaccactgcactccagctagggcaacagaatgagactccatctcaaaaaaaaataaaaataaataaaaataagaaaagagagtgtgacaagaaggtrgaataatgaggagcttaagacagggcaggggttcaggtgtaaagattagggttgagtttgtgtaaaggagtagttagaataagcaagcatcccaccacctcattattgcagactccatccttttctcttgctctagatgaccaaaatgttagacttgcttgaggacttcttagactatgaaggctacaagtatgagcgcatcgatggtggtatcacgggtgccctgaggcaggaggccatcgatcggtttaatggtgagggagatacactggtccctggtgggtgtgggaggcctgagaaacctgtgataggtccctgggatgggagggggactrgcttgggggacattggaaacttaggctttgagttgggggcatggttgtttgtcatcagagaacatctaggagcaggtggacagaactaccgggtacaagaaaaacctgatccaactctcacctcctagctcctggggcccaacaattctgcttcctcctgtccacccgagctgggggcctgggcatcaatctggccactgctgacactgtcatcatctttgattctgactggaacccccataatgacatccaggtgggaactcgcatcctagaacccctgcaccatttagcaaggagatgtgggttcatggaggagggtgtcatgttccggggtcagaaataaatctcttctgggaggagagaaggcccttcttcagcagccttctttcctgaggcagctctrtgggcagcttctccccggccactcccctgacccacccgccactttctcttgcccctgcaggcctttagccgggctcatcggattggccaggccaacaaagtgatgatttaccggtttgtgactcgcgcgtcagtggaagagcgaatcacacaagtggccaagagaaagatgatgctgacacacctggttgtgcggcctgggctgggctccaaggcaggctccatgtccaagcaggagcttgacgacattctcaaatttggcactgaagagctattcaaggatgaaaacgagggtgagaaccttttctgcagctctgtgaaagcaggcccctgctctctcaggagtacttatcagccccctggggaragaaaaacaactcttctctgcagcctttgaaggaaggagagccttcttttagtagcccttggaggaaggttggcctctttctttgcctgtagggttaaaacaaacaaaacaaaaacctttcaacattggctcccggggaaaaagccttctctagggctcctgtgaaaaggacgcagagtagaagctttcccatcagcctttctaaactttggaacccaaagttcccgtttgttttccctctcaccaggggagaacaaggaggaggacagcagtgtgattcattatgacaatgaggccatcgctcggctgttggaccggaaccaggatgcaactgaggacactgaygtgcagaacatgaatgagtatctcagctccttcaaggtggcacagtacgtcgtgcgggaagaagacaaggtgagaggctttgggggccagacattatctatcccaggccatctccaaaaggcagtatcctttactcagccttgaagtaggagggtctgtcccccttaaaacagtagtggacctcaaacaacttcttcgtctaataggtgagactggacttcagagagaaacgtaggcacagacagtactggtaaacacagaagggtaccttctgagacagtgcaggagaaacactgtcagagggattagaggagagatttagaaaacatgaggagagcacattgcaggtaagagatggcatggaacatgcgcaatgtccagaaaatgtatgcagagccacgaagctgcaggagtggggagaccggattgggctgacgcagcagagtagggatttccttgcagtggaaggattagcaaagaaggagacccccagtgttcattcattctgttgcccttcagattgaggaaattgagcgagagatcatcaagcaggaggagaatgtggaccctgactactgggagaagctgctgaggcatcactatgagcaacagcaggaagacctagcccggaatctaggcaagggcaagcgggttcgcaagcaagttaactacaatgatgctgctcaggaagaccaaggtgaggactgccccagatgcaggcagtaaaggggggaagtgatgatgagtagggacttgaaggctggagctatttagagggaaagagagaagcctagaagtcagagccttcctctgctaaaagggaaagacataaggtagagtcattaggaactacccagaggccaggygggtttgcaggagatttaaactcttcggtggttgcacaggcatcctgtggacacccagggccattgcttagagtaggttttgcaggagaagcagaggggcccagagactgaaggtgggcggtgaatggagatggtgtaggatatgcggctcccaagtcagactttgggcagtgatctggtgttcccagaaggaccaaggccagaataaaggtagacaagtctcggcagggaggaatccagccagaaagggcctcagcatgggcatatcccgagagccctccctgaccactgggccctttccacccccacagacaaccagtcagagtactcggtgggttcagaggaggaggatgaagacttcgatgaacgtcctgaaggtggcatctgtgttcctgactctacctcacctcttcccgttttattttccagtttgctttaagcccactgtttttatacaagtaaaaaagtcttcgtgtgtgtgtggaaaaactcgattgcagatgagcagaaaggaagaaatattcatagtctctctgctagtaaacttcggtgtgtgtraccacataggctagatccagaaaggccatatcattttccattcccactggtaatctgggcctttgtcagatatcagctgttaattttaaaatatgactggttcttttagacttagtgggttagtagttctgaagtgcttgggagagaattgggagcacctcaaacgtgacaggaatgttcctgtgttgtgtatcttgtgggaatggggtgctaaggaggactgaggcttagaggaggtrgtggctcagctaactgatgtcatccccaccctcagggcgtagacagtcaaagaggcagctccggaatgagaaagataagccactgcctccactgctggcccgagtcgggggcaacattgaggtgagagctgggcccagtgttcctgagttctccaagagggcatgagggcaggaggttggaagttggtgcctggatcactgaaggtagaaaggacaagacctaagaaccctagacrtttgtcgccattgcctccttgctcccaccctcaggtgctgggcttcaacacccgtcagcggaaggctttcctcaatgctgtgatgcgctgggggatgccaccacaggatgccttcaccacacagtggctggtgcgggacctgaggggcaagactgagaaggagtttaagtgagtgtgggtgatacagggctgagttggacgcaaggggaagagctttgggtrttcctttcttccttggggccgccatatgatgtgaccttactcaactgattatcaccctccctgtcatacaatacttcctggctcgatttcctggggggtggtctcagcccactccacctcccctcagccgagcctagagtagaggggccaggcatcctccccaggggaggggcgttgaagcaaggagcctctcctgggctgtcctagcctcacatttacttgaccacaataacctggcaggaggagctggtggaaaggatgaagagctgactgatggggcccaggaattaagtaccaaggccaaagggaaagacccaggggtggggcgcagggggacagttaggacttggagggctggtaatggtgagagtgagaggcccaggggaggagccctggagcacctggggatttgggggtttgggggtcctcagtcatcctcgcgcctccctcactgccctataccccttctgtggctcccctaaccctcctcccactcccatgctccttagggcctatgtgtctttgttcatgcgccatctgtgtgagcctggggcagacggctctgaaacctttgccgatggggtccctcgggagggactgagtcgccagcaggtgttgacccgcattggagtcatgtctctcgtcaaaaagaaggtatcagtcttcctgtcacccaaagaatcaagctggctgcctagtctctgtccttcctctgcctctgtccctgagttgtaagcttgcgctggtgtgagacggaggagactggagcttcctgtctgtaagcgcctggagctgacacctaaccctcccaccctgccaccccaggtgcaggagtttgagcacatcaatgggcgttggtcaatgccggaactgatgcctgaccccagcgccgattctaagcgctcctccagagcctcctctcctaccaaaacgtctcccaccactcctgaggcttctgctaccaacagtccctgcacctctaaacctggtaatcagaagtcaggatggtgggagagacagaaagggagccaggagtcagggcgggagaatctctgtctttatcactgtgccttcccctgcagctactccagctccaagtgagaaaggagaaggcataaggacacctcttgagaaggaggaagctgaaaaccaggaggaaaagccagagaagaacagcagaattggggagaagatggagacagaggtgtgtggctccctggattcccctgtggagygggaggggagggggcttggaggccaggtacctgggagccctctggctcatcctgaccccattgtcctcttccaggctgatgcccccagcccagccccatcacttggggagcggctggagccaaggaagattcctctagaggatgaggtgccaggggtgcctggagagatggagcctgaacctgggtaccgtggggacagagagaagtcaggtgggtgcatggccttaggagtgatgggggattagaatttgggatttccctcttctggggtcaggggatgagggtaacatcctcccttcctatcccctaccccctcccacagccacagagtcgacgccaggagaaaggggggaggagaagccgttggatggacaggaacacagggagaggccggagggggaaacaggggatttgggcaagagaggtaatgggtggaagggaccggacacctgggtcccagagggcatcaggggaggtggagtctggggaaccgaatgcttgggtcctgggcgggtagctgtttgaaaggccagtacagtacagtacagatagtagtcttgggacctgggaggagggtgtcctgaggtgtgagctttgacctgtctgtcctagcagaagatgtaaaaggtgaccgggagcttcgaccagggcctcgagatgagccacggtccaatgggckacgagaggaaaagacagagaagccccggttcatgttcaatatcgccgatggtggcttcacaggttggggagactctcgctgctttctgctcctcaaggggatctgctcatcctcatggggtttctcgttttgcctgaggcttcctgctacctttaattccaagtaacttccaatgaagtatgttgcatgctgactccgatccttgctctaaatctttcttaagtatccctcttaactccaaagctggccctaatcccacctttattcttaattctaacgaacctggttagaactgagtttgttccaaacctaacctttacccattcctcttcaggagccyttagttccctttcattattcagtttctccatctctacctgtctgttggactgagtgcagtctgcaaaaccctgttacctcttctgtctgctgccttctttgcagagcttcacacactgtggcagaatgaggaacgggcagctatttcctcggggaaactcaatgagatctggcacagaagacatgactattggcttctggctgggattgtcctgtatcctttgatacacatgcaagaaggaaaaggttctctcaagctggcaaaaaaaaaaaagatgatttcacacccagggacagggctagtgccacactttggggagtcaagccaaaaggaagaagtgttcaaagccaagcccattcctgttaaattccttgatggttccytttccttcattggtagccatggctatgcacggtggcaggacatccagaatgatgctcaatttgccattatcaacgagccatttaaaactgaagccaataaggggaactttctggagatgaaaaataagttcctggcccggaggttcaaggtgggaatgagggaggaaaggagcgggttatagacgggcttgggtcagaagtgagaccagatctagttggaacctagggaaggttaacaccttcagggctgaggtgatacctggggccaagaccaaagtgtaaccttgtgcttgggagtgtgatctgggtcagggttgctgctaggttcgcagtcggtttggagctgggagtgccctgggccagcagtgagggcagggtgggtctcttgctatgtccgcccccccagcccctcacccactgctggcagagccctaccttcacctcccaactctgtgccctcagctcctggagcaggcgctggtgattgaggagcagctgcggcgggcggcctacctgaacctgtcgcaggagccggcgcaccccgccatggccctccacgcccgcttcgccgaggccgagtgcctggccgagagccaccagcacctctccaaggagtcgctggcggggaacaagccggccaacgccgtcctgcacaagggtaagggccgcggcggccccgcgcgggggagggcccacaacgctgcgtaagtcttcaccccgcacccctcaaaatcttcccaccccctgacccctctacctgctgaaccatccccctctgacctctaaccccactcctaccgacctggcacccccttggattttagcctctaggacttgtgcaagccaaccctcatccatgtctgatagcattccatccgtgcccaatagagggacctgccccagcctctgtgtcccctccacacagtggggcctcttcactggcagtggaactgcatgcctgccatactgcttaacatcatccagttaggggccttggactgtgaatgcaccatacagatccctggctgtgatcaaacaaatcacattccctcacatgtgtttcaccccataaggcagaaactaccacccatccaaccctctggccttaccccatgaaacttccctttgaccttcgacctttcctcctaccccctctcaccttgccattgatagagattatatcccaaagccctctaaccatctaatcctgcctggtgtagtcactgactcctggcccctttgatccctgttctaattccttgaatctgtaatactgaccttctaacctccctctccccttacatattaaaaccgtgattccttaaagctttgacacttaccacctcccatgcctcctgactatttcctccccatcatccccaaccccaaaccttgctcttccagtatgagatgttctgacaactccccgcccccatgtcttccaatgtccccccatcttcctttcctccatgctccctttttctttcttctttctctccatctgtcttctgtggtaatctggtctctctgtctcttttcctgacactttttcttttcccctgagttgcttctgttttccatctacttcttttactttcttgatctctggttctttgacatctgtgttctcctctctcgctctttttctgcctgtatctgtccatctgatgcctctcttttcctggctccatctctgtatttccctgtctttctcttgcccttctttctctgtggccygggccccagttctgaaccagctggaggagttgctgagcgacatgaaggcggacgtgacccgcctgccagccacgctgtcccgaataccccccatcgcagcccgccttcagatgtccgagcgcagcatcctcagccggctggccagcaagggcacggagcctcaccccacaccggtaaccctctttscccctagctccagttttccctgtttgtgttcctcctgcacacatacaaacacttccatcagaatcctatacaatatggaaaaacaacttgctagaacacagtcatcacccttgagtgagtctccctgcctgtgtatcctacccttagcagttgtggagtgtggctcataatgtctcycctacagcttctttcctctcacagactatgaactaactccaacttctgcttcctctctgttccaggcctacccgccgggtccctacgctacacctccggggtacggggcggccttcagcgccgcacccgtaggggccctggccgccgcaggcgccaattacagccagatgcctgcagggtccttcatcacaggtcagctggtgttttcctaccccctgctactcacactcctcctttgccaaactttatttctgctcagctgccctttaactgctctagtccatctcatttccttggtggtatccggtgttttatgggatagagttgttctaggctgtccccccacccatccctttcttaacccctcttcagtcccctttattaaaaaccagagttttagtagatctgtggcttggtgtcttctacccgagccacctccctccgggttccttcaagggaaagtgaatatgaaacccgaggggttagagagtgggaacatgtgttcaatcatgtagcacaaagtggaatctcagggaaaggggtttgcccgggtcttccctccctcacgtgggacaacgggaagtggcaggaggtgacctagaagtgagaattcaccattgtcatgaagtgacgtttgagagtgatctggagattgatctttccttacccctttcccaaacagccgccaccaacggccctccagtgcttgtgaagaaggagaaggaaatggtgggggcattggtgtcagacgggctggatcggaaggagccccgagccggggaggtgatctgtatagacgactgactggatcccaggcctgcccttcacccaggccccgtccccgaggccgacccccagctcaagcgctggggcctgctgccagccctccaccttccccaccccttgggccatcactgggctaggaacccctttgcccctctctgcagctcctctcttcaagaagggccctttgtctttctccactcccacacacctttcccaccaagccttgaagactgtgctggtgagaagaagtctgggtgggagatggctggcagggtcttccaagtaccttcctcccacactgccaagtatacacaacttcccagtaaatggttgtggggaggaaagaggtggagcctccccagccgtttccctgcagaatcagctctgtctcatgtggaagtggagaatcagccttgcctggcctttaggaacttttgtggggaagagagctttgaagagaggagggggactttagagagggatgaaaatgagccctgggagggaggaagggacgaggaggggtggctgcatgttaccgtcccctacctctccccacgtggagggtggagcagttatgagggaggaagtcractgctgttcagcctcagaataaaggtgccgttcactggctcagttacctcctgtgtaccggcatcttgtgttgggaatgttcccccctccctagggaccaaggaccacccctacaaaaagagtaatggttgggtgatactccctcaagccaaagaggagctccccaacctgttctagggacccaggtaacctagaagggtgggagagaatacaatgggccagatgtggtggaagcccagctctggggctcaggttcctggaagacttctactaccctccctcctcaaggcctggatacagactaaatttgtataagtcaggcaggggacctagtcagggtcttgggagctaccttgtcgttgggaccagagcaaaatagtggagggcaggctagggaaatgtgggcacatcccccctcccaggaggggccggggagagtggcagtttgcatggcgaaccccccacttcctctttgctgccccttcactttcttgctgcccctttcccagtctctcttcacacccactcctggtctgtcctgatcccctcttctgtatcaggtttattggttgtacatataaattatactttcnnnnnnnnnnnnnnnnnnnnnnnnnnnnnnnnnnnnnnnnnnnnnnnnnnnnnnnnnnnnnnnnnnnnnnnnnnnnnnnnnnnnnnnnnnnnnnnnnnnnnnnnnnnnnnnnnnnnnnnnnnnnnnnnnnnnnnnnnnnnnnnnnnnnnnnnnnnnnnnnnnnnnnnnnnnnnnnnnnnnnnnnnnnnnnnnnnnnnnnnnnnnnnnnnnnnnnnnnnnnnnnnnnnnnnnnnnnnnnnnnnnnnnnnnnnnnnnnnnnnnnnnnnnnnnnnnnnnnnnnnnnnnnnnnnnnnnnnnnnnnnnnnnnttcccctaagagtcagtagaggtcactacagctccacaggttcagctccagtatgaagcaaaggcacacttttttttttttttttttaaggcgttgagggtcagatctgtctagcttaccaaatatttgaactgctaggcacttccttgatgtttattgttcactaaacagagcctctgaaagattgagagaggccagacacttagttcacaaggctattatattaaaaaataagagataaagccaacaaatatttattgagtacatactatacagtaacactgctgttggccctggagataaaacagtcacaggtcagcccttgctcccatagggcttacactccagtggggacacccacaaagcatgaaaataaaagcagtaaaaataaaacagggcattatgttacagaggggtggaggaaaaggctctactatgttgaaggcagaaaaaggcctcccaaaagagggagcatttaagctgagatgtaaggacaggaaaatgccaaaatagggttacaaaaattgaggtttatacccccataagtgtataattatgatttgtcaatcaaaaatatttatattttaaaaagattggaggcctctaaaaaattgaggttaataataagttcacatttttaactaagagaaaaatgttacatagtaggttaggatttctttagcaatagaatgttactttagaactttggggccgggcgtggtggctcacgcctgtaatcctagcactttgggaggccgaggcaggcggatcatgaggtcaggagatcgagaccatcctggctaacacggtgaaaccccatctctactaaaaatacaaaaaaattagccaggcgtggtggtgggtgcctgtagccccagctacttgggaggctgaggcaggagaatggcgtgaacccaggaggcagagcttgcagtgagccgagatcacgccactgcactccagtctgggcaacagagcaagactccatctcaaaaaaaaaaaaaagaactttggataaaataatctatcagtcatacctattatgctttaaatattctacctacagatggtgatatcctaaagagtgtaggatctagaccaatggtacttaaattttcacatgcacacacatcacctgggattgttaaaatgccagagtctggcccggcgcggtggctcactcctataatcccagcactttgggaggccaaggtgggcgccatcacctgaggtcaggagttttgagaccagcctgacaaacatggcgaaaccccatctctactaaaaatacaaaaatgagccaggtgtggtggcaggcgcctgtaatcccagctactccggaggatgaggcaggagaatcgcttgaacctgggaggcggaggctgcagtgagccgagatcacgccactgcactccagcctgggcgacacagtgagactctggctcaaaacaaaaacaaaaaaacaaaaaaccctgccagagtctgattcaggaagtctggagtgggatcctagagtgagactgtgcacttccgttgacagtacaccaacactgctggtccttgactatgactttatggtcataatatacaggattctaaaatagaatacatggcatatatacaacaggtgatgtcccattatgggacacaaattttaaagacacttaaaattgtataagtatcttttcagtagcgctagtgtgttcccgtgactgtaaagataacacagataatagcaaaagtttgaaatatgatgcctttcaaatggctctcccttcctactttgataggctctaattaggtgcctcacataaatgccctttggaatttctgatacctgccctagcaggttgaagggagattctgaaatgaagcaaggctcctaatcatagtcacaggcagggagccatctcaatttctggaacacagaactgggagtggggagacagcaggcataccagcacccttacatgccagagaagtgagattaacatgacgcgaaaattagcctcttctctcccgttccatcttaaaaaaaaaaaaaattcaaaccattgacaaagaattgctaaaatgggacctgttgctcccacacaccagagccaccctggacaaaagccaacgtcccagctaagaaaacagtctgtcttcttcccacggtaacgtaggctttgtttatatcatcccttggccactccatcctgaaaatgtaagactggcacagtcagtagatgggggcgagttcgtctaggagcctccccaactcagcatcaacacctcccagggcgttccctcctgccttcggctcatctctctcatcacatgccaatcctgggatctgagagagagtagtcttgacatcagcccccgcgaggctgcagctcccaccttccttcggctgtagcttccgagttcctcggttacaacgtgcaacgggtcaggtggccaatgtccttgatctccgcacagtagagcactgggggaaagaagaagggttagtggcagcaggagcatgccaacgaacctcggtattcctcggcgctctctcccctgcatcctccccgggcagcccctcaccgttgctaggcagcggacgccgccagcgccgcgcaggccccaggaccctgtcccagagccgccggagcgcgcgccacccagcactcctaggccccgcccccttctcgctctccccttcttcctccgcctctccgtcagcgtcgctgctttccttggccgggttcccagcctcatctcgttcgcacttggcccgcgctttttcctccaatcgcgaccacaagtccgagtcaagagccatctccgtgaggccgccgcgagggagctgcgagggcgcgcggcagaaggggcacgtgaccacgcggcgcaggcgcaccacgcgcgcggccgccccgccgccgtccccgcgcgccgccagctcgcggaggcaggcggtgcagatcgtgtggccgcagcgggcgcgcgccgttccgggcaggcggcggggcgcgcggcacccgaggttgaaaggacggtagcagatgttgcagtccagctcgccccgctccggaagagagggtaccctcaccaagagctgcatcgtgcccgccgcggactcgaggacgtcgctaacgcggccagctccgtgaacagaacgagcacactctcctggggccgggtcgggtcctggggccggcgccgcggcctctttcccctttaaataggggaataagtgaggccccacccttcggagcgtcacgccttgatcgggccgctccctgtggcggcacgtgtgggggcggtggaggcttgaggccgggaatgacagcaatgatggagtcggggaggcggcccaggccatgccaggaccggagccctgggggccaaagcacccattcctccctactcccgggggagcggggtggggctttccttcttcccccaacgcaacgccagcgctccttaattctaccatgtacaaagccccgggtctctctctgcgcctgagccctcagtcactggcacaagtctctaaagccccctccgcctattcagttgctcgcagttagtttcacaatcccacccagtttccaaacacggcccgttctgcccaacctttagtggtccctgggcctttgaatcgattttgccctcaattctcattatagatgacctctctgtgttgtttgtaaggctggcttcctaaacttcattctccccaaactgcttaactctcagctggtatctcagcctaaggagggacctagatkccaggaccatggctttaggaatgctgggaatcctttccttccggaggcctggacacccacacatcgtgatggccccagcaaagctccccagcataagttctgactcaggggtctgacttctcccactggtaaacaggacatggtactcacaacccacattcccctcatggtgccacacccacacacagctgcctcctcaccctcctctcctggacctgcagcccaggttctgttatggagggtgataacacagtctagagccagctggcttgagttcagatcctagcttccacctcttactagttgtgacactttgagcaagttacttaatttctctgggccttggtttcctagttttaaaaatgtggataataataatgaggactgaatgaacttatatgtgtaaggtgcttcaaatggtgtccagtacacagtaaaacaccaggtaagtactatattagctactattgttatcctgtgcccccagcctatactgaattcacattaacttctgagtacccaacattttcttttttttcttttttttttttttttgagacggagtcttgctgggttgcccaggctggagtgcagtggcaccatctcggctcactgcaagctccgcctcccgggttcatgccattctcctgcctcagcctcccgagtagctgggactacaggcgcccaccaccacgcccagctaattttttgtatttttagtagagacggggtttcaatgtgttagccaggatggtctcgatctcctgacctggtgatccgcccgcctcggcctctcaaagtgctgggattacaggcgtgagccaccgcgcccggccagtacccaacattttcaacacccatccatcttgaccaatatgtgcatgatgagcttctccacacccatggcatttaccagctatcacaggcaatgcaaagctggtttttaaacctaaattgttaaaacctagagggtaatctcttttgaggaggtataccatcatttttaagcaaacatttcagaacttttgaatggtattgtctgtgatcatgggagaagctgtctacttattacagtgatgctgtcacaattcaaaactttttggtcttaaaaaaggactggtagggccaggcatggtggctcttgcctgtaatcccagcattttgggaggccgaggtgggtggatcacttgaggtcaggagttcaagaccagcctggccaaatggtgaaaccccatctctactaaaaatacaaaaattagccgggggtggtggctcacacctgtagtcccagctatttgggaggctgaggcacgagaattgnnnnnnnnnnnnnnnnnnnnnnnnnnnnnnnnnnnnnnnnnnnnnnnnnnnnnnnnnnnnnnnnnnnnnnnnnnnnnnnnnnnnnnnnnnnnnnnnnnnnnnnnnnnnnnnnnnnnnnnnnnnnnnnnnnnactcggtctcaaaaaaaaaaaaaaaaagagggggaactggtaggtatctattgttaataaatacatgatgggccgagtgtggtggcttacgcctgtaatcccagcactttgggaggcagagacgggcagattgcctaagcttaggagttcacgaccagcctgggcaacacagggaaaccctgtctctactaaaatacaaaaaattagctgggcgtggcggcgtgcacctgtagtcccagctactcaggaggctgaggtgggagaattgcttgaacccaggagacagagattgcagtgagctgagatcgtgccagtgtactgcagcctgggcgacagggtgagactctatctcaaaaaaaaaaaaaaaagcttttaatgtggtggtagattaatggtggccccaaattcctttgcaatgtgactttgctgcatctcacatcaagaattggggtctctttctctatcccttgaatctg

SEQ ID NO: 96118 - DNA, 13852 bp, Homo sapiens
acaaaaaaataaagaattagccaggtatggtggtgctactctgaggcaggagcattgtctgagctcgggagtttgaggttacagtgagctatgatcacaccactgcacttaagcctttactcccattcccactttgatggattcgcttcacttattcattcaccagctttttgggtttttctttttagtgcttccggtgtgcctagaatacctagtacttggggtgcatatccatttgtatttttgaatccttaatctttggcttccaggataaagatcagtcaggtttctaattctgtgtgcattcttacagccaaaccgtgtactctactgacccatgatcaagtggctgttctcccaacagcagcccatccatgtggcctccctaaacttagctgtggtgctggatgcattaaccttatcgtgatgtatgattggatgttatagtatcaagaccaaatgatggatccctttactcagctccaaggtacagccagattaacatttggtacagtagtaaaacacttgagactcgtcataaatttagccccaaaggttagagctttaggaatttctgccatgggttgccatggttctgccacaggctgaggcagaccattgagacagatgccagaatattgggaccacattgtattataacttttgatattttacttttgaggctgtttaaagtattgttgtgtatgtgtgtgtgtgcgtgctatttcaggagtaggagtagggggttgggctatttggagaatctgatggaaattatagcaccattttccaaaaataatacacatccacagacacacacacacagagtatttagaaacagtttcaggatggccaggttagtaatccacctgtgacttgctgtaagggtagaaacttttctataccataacttaagcctttatcatgtactatgttcatttatcttttcatgtgtgcatgctttatcccagtgagcaggcaagcttcctacaaggaacatatgcctctttatgacccccagtaatgtgggcatgtagggacctcacctgtgggaaatcttgccagttgagtcctttgaagctgctgtgattcactgaggacggcagccttcccttcagcattccatccttcacccaccaccctctaacacaaaagagattaccacaagaggacttggaccctacactcatgttctgtttgctttctgggttttaggctaaagcattatttacatactcctcatgcaaatatccacttggctatttagagaacaaagcagtgcctactggaaagattttttttaagtattaataagtgaatgcattctattattttaaaaatttgtgatgtctttatccctttgtcagctccatactttgccccatacactcccatacctgtaatcaggacctcctttttgttctagcccatgaattcctaactgcactcctttcctgccatgtgcttgtgagagaaaaaaaagcaggcataaacctaatgctaatagaacggtggccatgtggtttttccttgttttcttgtccttccctcccccttataaatctccaagggccaccttcccatcctaactttggaagggttttccctccaggcttgtctccctgactctataggtaattacagccacctggtggccatatggggaaatgacagatggattggcccccaaaaatctggtgagaccctcttttttttttttaacttttttttttttttttttagatggagtttcgttcttgttgcccaggctggagtgcaatggcactatctcagctcaatgcaacctccatctcccgggttcaagcgattctcctgcctcagcctcccaagtagctgggattataggtgtgtgccaccacgcccggctaattttttggatttttagtagaaacaggcttttgccaggttggccaggctggtcttgaactcctgacctcaggtgatccccatgcctcggcctcccaaagttctgggattacaggcgtgagtcactgcacctggccagagaccctctatggaataacttttggttttggatattggggaagcaaggaaagtgaatcctatggatagagactatagcacaggaaccagacatcctatttcttggtccttccttgcctactaggacacaacatcccccccactaggtatagacggatgagttcacttaacattggagttcattcaaaatttattgagctgcaactgtgtgctcagcaatgagaatatagcagtgagcaagatgtgaacaagatctctgccctcgtgagcttacaatctagcagcgcagccagcctattacagccataattttacaattgtaataaaaactctggaaaatgcatggtgctaactgatttatcagaaagtcttgacccaccaagaaatcagaaaagacctccctgaggaaggaacatttaggatcagctaggtggaaagtgaaaggaagagtgttgcaggcagagaggacagtgtgtgagggtctgaggcaagacatgtaatgaactgaaagccagtgtgtctaggccatagagaacaaagaggggtgttgcgagatgagcctgatttatacaagatctttgaatttaggactttattccaaaagcagttggaagccactgaagaagctaaggaaagttcgatgtttaggtttgtttttcatagctgactctcattgcagcatggaagtcagaagtggaaatgggagaacaggttaggaagtttccgtagcagtttagacaagaggtgatggtaacttggagaaaagaagataggttccagagatatttaggagacagattacacttgatgagtgactggatgtgtgaggaaagggatgtgtttctagcaagagacattgaagtaggagtctctggaagagggacaggttttggcagaatggggacatcctgtaggcacaggacaggccctgaggcttgcactagaggaacagcatagctttcattctcaaatagttcagggtttaattgagcaaacaaggtacacataattgcagagttgattaaagatcaaaatgatcgatttagataattcatggactcctgcattccatggggttagatttaaaccctccatctcacagtaaattcagatactgccgaagccaacagcaatgtttccacctttgttcatgcctcccaaagcccctcagaaaacgcctatatagcccaccagtatctcacaggggccaccttctcctgtgctgggccctggtgtcccctgccagaagacacactaaactcttcctgatttgttttttgcttgctgctgccaggaagttcaactgtctgtcattctcaaatctcccctccttaagttaaaggagaccaaatctagccattacccccaatagtggttctcttttggtcaccaggagagttttctgacttagttagcatctctgtttacattacccctgtcgagctccctcttttggagtcaccgtcttgcaaccctgtcttcctcatcttctccaagtggcaaactgcctcctttttctccctcgccaaagtgtcactaatttgccggccttttccccactctagttttccttcaagttagtaaatacccacctctttgccccaaaaggtcaggagagaaatctggggtatgggattaacaaagaagtagccccaatagctattgcttaactgacacttagccttccttgcctcctcttcgccacaggagaactctgcaaactcccttccagagacaataactgcaaactatacaataggaccacaatttcctattgtgcagggatcctaggacaaagccacatcccaaatacttgctgagagcagtggctacaaatgttaacatgagattagacattgagatggtccctttatattgagagaacatggactttggagttgggcagacttgaatttgcattctggctctagtggttactacctagtgtggctttgagctattaaactttccaaagtttcgaaggacttatctgtaacatagtaatggtaatccaccttatggggtagttgtcttgaagaggctatttgggaggctgaggcaagaggatcacttgaggccaggaggttgaaaccagcctgggcaacacagcgagaccctgtgtctacaaaaaattaaaaaattaggcattgtggcgtgcacctgaagtcccagctactcaaggcagagatgggaggatcacttgtgcccaggagctccaggctgcagtgagccatgattttgccactgcactccagactgggtgacagagcaagaccccttctctttgttgggggcaaaaaaaaaaaagagggtatatgaagtacctagtataatatctagcctgaattgcctataatgacgcacttcctttctttcccttgggtttcagctgccaaacactcttctacaagtaagataagccagctttgtatggtcaatgataaacatttcctatttctttgtaaatcccatcttcctgcagacatctcatttccatcattgccaaaaaagtccttccatccctcacccctgtagaactactctctcttaactatcaaacagttctgcctgaactctgactatcctcttctacatctccctaaaccaaggtacttgatcttcttgtatcattcccaaagattaattcactaattttctcagagcaaactgtaatgaaggcagggaatagggcctttacacttcagaagggcacaggctagctcctggagaggagtggagatctgggtccaggcacccctcggccccaccacttttcctcaaggcacagaaaaagccaaactcgaaatacgtcttgagtctacacgagtgtacatctccttgcctacaactccgtgagatcatcattgaagtacagaagtattgcaggtgtgtgaagtgtaccgtccatactgagatagtcaaattcttcctcctcatcccggatcccattctcttccagggtaaaatccatgttcaggttcttcccttcatatttccacgtgtagctggcagcatgtgagttataggggagatagcggtgtaggatttcccatatggactccagaacccccacctggagaacacagaagcaccccacccccagaattctggatggagtatacatatacacacgctgggatcaaagtgcctcccttggcagatagcagcttcaggtactctacggccccgggaaaaaaaagctgaaactccagcatgcaatgagcagaccctaaagtcctacagatcttaatggcagccacttctaactaccggatggccataaagggtcaactgtcccctcactatatccatgcaacagagtagattaaaaagaaagtccaattgctgtccaaaacggcgtgtaagagcttcgaaggaccaccatcactaagatacatgaactgctgttcccaggcttataaaggagtctcttgtccccctgtgacccagacactcctagaattcccaaccctggggacctaggtgctgtgctttcctcagttgcctcaatgtaaaggacagaaaatacactcccaccggttatggaaaaaatgttgccctgaagatcggcctggagatttgctgggattccccattccttctaacctgctccttgtcaccagttctcacctccagtgtgtgctcctgcgacgtgagcgtgttaatgatgcggatgctccgggtcttggcagacagccgccccacctcataatacgacccctgccaccagggcttcccaaaatcgttggcccagtccgaacagggcagctgaggcggaacgtgcacaaagcggccccgcggggtgcagtacctcaggcagccggtcagcggatctatgtgcttgcgratctttaaaggagggtttggggcgagggtgtcagagcagccattaggctctggctagcctccgcctttccttcccatccccgctctccatttcctctacccacaatcccaggttccagcataactcacgtctctggtctttggatcaaaccagtggctgatatcctggcctgcaacttccacgatgggtttcagcagcaggttccctwgaaragagcagcacagccactgtcaatgccagcccttcgagaaccaggcaaacgcgcgcgtgcacacacacacactccggccccggcccaaygtgtggcccttacccttgtattcctgtgccaatgacgttaggtcgtacacgcgtcccaggtaagatacccagaggtcttcgggcctgttatgttgggccacctccgccggcgtkaaatagcgacgctgaaaatactccaagtctggcccagccaccaggccccggcgcggcatggctcttgctctgtcggtcactggatctcttggttactcctttgctcctcagcacgtactcactactactacgacctccgtcgcgtccgggagccgaggggagagcgtttatccgctgacatggaaaccattgtccttttccggccaccgtccactgagataaatatcaggggcggggtttggactgcacgtgttcacgggaaacgtagtatgagtcccgcgtggggcatataaggatcaagtaattgagttgcgccgctttcaggagttgcggggtggggcagagaacgaatacgctccgttttaattcagtggcctgggctacatgggatatttaggacagactatctctctgagacagaaaaacaagggaggaggcagtatgaaagaatgtattctcgctaaattccagtttctaaaggatgtrtaagaaaccagaggtaaaggtctcgcgatatcttaagacatcyggcgtagtacgcttcagtgagccacrgcgctagagaagtaggagaagctcgcgagatctgtgccgttgccgaggagactaggagggggaggagaggggatctcgcgaaaggaaagaggtcgggagcgctcgcgagatctcggaccacccaacctgaaaggtgcttaggaagttgaaaggcccagaggaggcctccgggcaaatggccggagctggacygaccatgctgctacgagaagagaatggctgttgcagtcggcgtcagagcagctccagtgcyggggttagcacgggctctggttctgggactgaggggcagtcaagcagcaagatggagggggtggggaactgcagctcccggcagcctctgggctttgtgtgagtgccccgcgggctgccgggagctgtgrttccgcgggcgggcagcctgggctgcgcggtctgagcgcttgttacaccccgcgcaggattcggacggagagcgcgaggactcggcggctgagcgcgcccgacagcagctagaggcgctgctcaacaagactatgcgcattcgcatgacagatggacggacactggtcggctgyttyctctgcactgaccgtgactgcaatgtcatcctgggctcggcgcaggagttcctcaagccgtcgggtcagtgcccggggaatgcacacccgcctggtaatgtggcggaaccttacgcaaggcatttccccttaagggcctggctgcaacccttgttttctggggctcgttttcgtggctcagaggggcgggactgattctggcctactttcctgatgctctgatccttctttccagattccttctctgccggggagccccgtgtgctgggcctggccatggtacccggacaccacatcgtttccattgaggtgcagagggagagtctgaccgggcctccgtatytctgaccacgatggcgcttacctttcagacttcattaaacttatgaccgaatgggcctgtgtctgtgtgtagctgggatgccggtgcaggatagcacaccccatccctagaggaaagggctcatctgaagtcgggagcaccctcaaccctcctctcccaaccaagatgtccaggggtgccaaaggttctctcaagttcaggggtagagatggggggcagggctgaatgacggaccaacaggccccagggtgggcccctgcatcttccctcccacggctgctgctccagaattgtggcgggagggggtgtcatcctgctccggaaggcccattgtttcccaccccggcctggcaacaccgagttcctctaagctggggtcagagaacgggctcaggtccccaaggggagcagcggcaggcggccgaggctgggcccctccactctattgagggggaggtgcctggggtcaggaacagatctctgaggtctggccaggaagaacggacaaaagcgataaggccagggggctcaaggatgctcctctctgctcatttgtagccctggcacatgtttcctgttcctcggcacagggcaggggtgatagtacttgtgccacgcctctgttcgcagagcgcgttcagttcgttaaatctttattgatgcgtggacactccttcccctccagccccgccccccagccccagaaatactagagaagctgcaccataaaacgagggcacgagattgttgtcccattcacgacggagctgagggggaggtgtgcaggttccagcctagatgttcaggattgagatgtgggtcgtgaaaggaaagtgggttttccgggatgtgggggcttttctcagcactgggtccactgacgctgctgctcccaaggggatgctaggactccgctcaggcaggggtgggggcagggcaggtcggaagatgccgggcttcaagtccttgggccgaataagagggagggcagccgtcagggttgttcttgactcgaggrtcattagacccagacctttcctgatgtgggaacggcctgggaccctggtgaggcccggatttgccgcggctgcggggcgcgccgacgccgataaagggctcggctgtagggcacgaggcaatcggctaggcggaggcgcaggcagaggcggcggtagctggccagagcaagcacgagcagcggcmcgaggagcaggaatccggtgaccagtagggccgtgaaaccggggtcccgcaggtgcgcggtgcaagggggtgcctgggagcgcaggaactgtgggagaagaggcrtcaggcccaagccgaccaggcgatactgtgcacggggtggaaacagcccaggcgggttgaagttgtggcccatagaccccaccgccagcatcaccacacaccaacactcacactcacacgcacaccccggggcgcacgctcacctgagagtggcagaggaagccgaagcccagcatggtgacagcgggtagcaagatggtccctagcaccagcaccagcaggaraagattgaaggcagccaccagcagattctgggctgttacaagaacagcgcaggcccaacagtmcagggggtcccggggctctgggccgtcaccaggaaccgctcgctgtgccccggggacatccgccatggcccgcctggatcccgcccgcctgggccgctgcccttatagccctctttcctgcccctcccccggcccagcctctccccaccccccttatcctggaatgcggctctaggattaggcaccccccatcccgaggagcggaccagagccctggacattccacaggcgcctccggggaggggctcaccctcgccagggtctgcgcagtcctccccatcaatcacggtcttgcagccctcccggtactcaacctgctaccaccagccgttagcgaaacaggattttttttctccgtttatttttaatattaatattctcacacaaaaatcaccgaaaataggggtagggttgggaagacccctctgcccctggggcaragagacagtgcagtgcgagggtgcgggactgtaaaccccccacccctccgcagccccagcgtggagaaaaaacaaccaacaaaacgaaaataaagccccagagaaactcaccccggggtgtccctgccccagtgaggccctggccctgggttgtttcacacttaaaaagaaaagggggtgggggtgaaggtctgtgttttttaaagttggccggggctgggaaggacggggttccttttcctcatagttctttctttaaaacctttaatttttttattttatttatttttttttacaaaataccatttcagttcccacttcttcccctacagtacaggagttgctcaccctcaggtggggctggggtcgggtcgggagtggggggactggtccgagaaagtgcaggacgtaggggaggggagcgggtttgagcaccatgagaacccggctggagccgcgggcggacgggtggagacggtcgggccgggcccggacacacactggggcgcggggagagcccggcgacgggcggtccctggaggggcgggcaggatggcttgggggtgtgggaggtcgggttttcccaaaaatgaataaatagaggtgagtgggactgttataaattaaaaacaaaaaaacaagaaaagaacaaaaaatacaaatcataaccaagtgaataaagagacatgtacaggggtcacagctagcattggaagtaaaaaaggaggttccgggggaggggtaaagcccatagaaagaatctcattaaaaacctcggctgccgtaacgtctatgtacatacacgagccgcgtgcatctgcgccgggcgggcgggcggctggcagggtgagggaacccgtatgtgacccccgccgccgccggagcctggtccttgtgtctgttgctaaaaaggccaaagtcggtgaggggaggcgctggtgggcgaggggctgccagccccctcccccgtctcccattttttttccttttttcctcatatttgctaaaaaaaaaaaaaaagtttttcttaataaattaagtgaggggagctgccaatggggtggaagggctgggcccgacccccttctcggccacaggcgggacctaggtccagcccaggcatgtgctggtggccccgcggcgccttgcgcgggcaggcaggcgggcggggcgtccggcctcatcgcgacgtgctggctggggcctggggggagaaagccggcgggggctcagggaaaggcgcggccgggctcccgaagcccgtccctgcagcctgccccagtgccctcctccgctgcccgcgcgcccgccgggccctcaccagcgtgaaggcgtcgtaggcctgagccagctcctcagtgcggtactgctccagcaccaccacgccctgcaggcctgcgctgcggcgccgggcacagccctcgcagtgtaccaggtacgtgttgcggctgccattctcacttgtcacgaacaggatgttaaacacctccacctggggcagggaggacagtgcagtcagggggagggagggccactgtggacactcagggagagcagcagagccggcccactcacatcgcactcgttgcagtagtaggctggctcgtccttgacacggccctggtaagcgattttcttccctgcccgcaccaggctctcgcgttgcacctggcagtgcttcatggactgcagcaggcagaacctggggagcagtggggttgtgttgagaccaccggcaaggaggaggcctgaggcagggctggakcaagggcagaggggtgggcagccccagggccctcccctaggggcctccccgcttcatgtctaggtcacatcctctgtcctgggcatctgttataggcgaagtttcctgtggcttttgtctatttggaccactagaaaaggtcatgacagcaaggacctagttagcctccccaacacagtaacactcggggcacaggcagacaaggatggagagaggtaaaaagggtggagtcagacaggaagaacaagaaaagggaccagtcagtggaggtgggctcccacccaaatagggtcctcacttgatcatcttgaacaagtcggggtcgctgattttgaccgtgcgagccacgttccatgacacgtgaatcatgggcacgatggatttgacgttcttcacctcattccactcgtatcgttccagggccagctggtactgataggctgcgggccaaaggcgatcacaacaggactctcaaacagcccccagcctcccaggcccttgccgctgaggcgccacaccacgccaacacctgccccaccctctcaccggtgaggggccccacgttccaggcaatgttgttgcaccagccggtggcctgcacccagtgcacagtccccgcattaatccacacgaggtctccgggtcgctgcacgaagcggtacacaggaatattggatgcatagagatcatccaggattggccaccaggaacccgtcaagtagtccacgccgtgcctgcggggtggccacaggtcaggtgggaactggggaccgagggcggggacgcggcagtctgacttgcgcaggacggcacgcaccgatcacagaaagcgctgatggtctcccagtagtgctcgtgcaccgcgaaccactcgcagtcgcctgggccaatgttgatgttgacggagcagaagttgttattctcctggtggcctgcaggggtcgacagagaacggcatggctggccaggtcggaactgcgatccccgatagccccgccctctgccctcattggctgacggctgagcgccgccgccagcccctcctctcgcgcttccagcatcagcgcgcacaggcgtggagcgcacctggcgttcggctgccgggcaccttcatgtacagctgcaccgtgttcatgcccaggatggtgtggcccacgtggctcagcatgttgcccgtggatgttacccgcatgaaggcgggcagcttyagcagctcctgcagctggggcttccacctgcggtgcggaagtgcgacgagaggctacaccccgcccccgccacgaggtcctagcagcactcctgccccaacttccctggcctcagccccactgaccgcttagcatcagacaagtcgatgttggtgccaaacttgatgatrtgatggttcttcgggtctggtgcgctgctgctggggcgaagagcacaggttggtggagagcagagggaggggaaggaagcaggaacagaaggggcacacctkcacagtacctaggaggrgttccagtggtgctgtctggctcctctgactcctcatcctcactctccttctcctcctgttcagccagagggtaggcaggcctgggtcagagacctttcgagagccctcccaccgcagccccgtcccaggacctgcctctggccacgttctcatctcacctgcagagactcctggaaggatgaggcctggtactgtgcgtacttggcaatggtggtgtgggaacgggagctctcacaaggccakatctgccgagtgcctgtcagatcccagttctcatctgagggctgctgcacctgggtgcgaacttccacggtgtgttcgccactcgcttccaccagggtcttggtggagaagaggcccaagtctggaagggagggccgagcagggtgtcggggcagaggcagaggatagggaccgaggacccaatcgaccctttcccttcctactcctctggctctgacagggtggtcataggtttagcagagctcagcccagaagaaataggcaggagccctagccccacaggaagctgggagtgctggcctctatctgcatcctcaccagccctctttctcctgcagctgctcaaggactcagcccctagaccagtgttcccagatgtgtgcgtggccatgtgcaccgcacctgacagacacatagtaggtgctcaatgaatggcagcttctttttttccccatttggagtctagtcaaaacagcagcttctttgagttaccattggatccaattaaagattaaagattcagtcaagtgaaagcctgaaatgtgcttcaaataactcagtgtgggg

SEQ ID NO: 96119 - DNA, 12459 bp, Homo sapiens
  misc_feature (1)...(12459): n = A,T,C or G
tcagaatggtaagagttcaggaaaacaggcattactgagaggagtttgaaagcggtttttacacataaaaaagatattgtaaactttttactaaatataacacatatacgggaaagttgaaaatcctaaggtaaaaagctcaatgaatttttgcaaacaaaacaggcccatataatcagcaccagaatttagaaacagtataaccagaattcctgaagtctcctaagtaccccatttccatcattactgtccctttaaaggaaaccattattctgacttctgatatcatgaattaattttgcctgcttgtgaactttaattaagtggaataatacattttttttatgtctagcttctttagctcagaattatgtttgtaagattcacccatgttgtacttggctgtagttcattcatcctttttgctgcagagtattacttggtataaatatattaatatttatttatccattctactattggtggacattgggttgtcgacatttttgattactaatattaggctactatccacatttgtgtatgttgtttggtgaactgtgtacatatttatgttggatatatacctagaagaggagctgctagacctcagtatgtgcataatgttctgctttaatagatactctcaaactgaagatctatttgtggttttccaaagtggctgtataaatttacactcccacccatagtgtaaagttccagtaaaatatatttttgaagagaaattaagtaatataagctttgactcagcaatttaacttttaaaaaatgtatattacagaaaaacttaaaatatgtaaatacataaactttttttcactgcacaactgtaattgagacagattggaaataatctaaatgttcatatagaaagaataggttaaataaattatggcaaatccatacaatgaaatacttatgcagccattaaaaagggtatgaatgatccataaaccacatgaaagatatcaccattatactgcttaatctaaaacacaggctaaagaataattcatagaataaaattatatatgcatagaaagggtttggaaagatggacattaaattgtgactaacaatttttaaaataattatgtaacaattatatacttctactttcataataaaaagatgtttactttttcataaactaaatggtatactttaagctatatagacttacttaaaaagtgttttcaaaacttttttctatgctatcaaagaaaaaggaatctccacatacatttttaagttagatacagttagaaactcccagaaaagctgacatgtttagttcactctatttctgactgggaggtgagaatgggaaggatagagaggtcaaatattctcgaaagagacatacttaagagacatatgcttggatctctcatttttctgaatggaagaaaaaggaataatgaatcagttacaaacatgtgattagcaagaaaccaataaagaaaaaactcttttgctaagaaagtagagttataggtagcagaggaaataactgtgttgctaagccaaaggacataagagctataaatgagaaaaaaattatgcaacaagaatttacatggcagctcaaatcatttattttatcacctaggctggagtgcagtggcggggtctcagctcactgcaacctctgcctcccaggttcaagcaattctcctgcctcagcctcccaagtacctgggactacaggcctccaccacatctggctaatttttgtatttttagtagagatggggtttcaccatattgaccaggctggtcttggactcctgacctcaagtgatccacccacctcagcttcccaaagtgctgggattacaggcatgagtcaccatgcccagcttcaaatcatttaaaacaagatgtatggacaaaattaaggctgcattagtaaatgaggtggtaataattatgaataaacgagaactgtatcaaagcataaatgttcatttaaaaagtatgctctaggccaggcacggtggctcaccccagtaatcccagctacttgggagtctgaggcaggagggctgcttgagcccaggagttcaagaccagcctgggcaacacagtaagatcccatctctaaaaaaagatgaaaaaaattagctgggcatggtggtacacacacacctgtagtccctgctatttgggaggccgaggtgggaggatggcttgagcccagtagttacaggatgcagtgagctaagatcatgccatgtattccagcctgggtaacaaaacaactcttaaaacaacaacaaaaaccaaaactcaaaatatctacgggccaattaatacaaataatagaaaaggaatgtagctggatacataatcatatacaagttaactgcatttctaaatatcagcaggggacaattagcctaaattttaaaaggaatgcatttataacagcaacaaaaagtgtctttaagttataaaaaatatatgcaaaacctgctcacagaaaaataaaatgttactgaaagatattttgtaaaaggcctaggctgagtgcagcagttcacacctataatcccagcagtttgggaggctaagacaggaggatcccttgagctcaggagtttgaaaccaggctgggcaacatagtgagaccccatctccacaaaaaaatcacaaaaataagccaggagtggtggcacacatctgtggtcccagctactcaggaagctgaggtgggaggatcgcctgagcctaggaggtcaaaactgcagtgagccatgatcatgccactgcaatccagcctaggcgacacagcaagaccctgtctcaaggaaaaaagaaaaaaaggcctaaataaatgtagacataactttgtattgtaaagataaacaattttcacccaaatttattttacagatttattacaactataagcatattctgatgacttatttgtagaactgaaaaagttgattataaaatcaaccaaaggacaaagaatagccaagatccttctaaaaatgaataaagagaaggaagggtcttgccttagccgccattaagatttactaaaaagctataataattacaaaagtatgatactgacagagagacaggcaaattgtctgatgaaacaaaagagcctagaaacaaatctgttttatataaatctttgtaatatgacataggtgggatagcagatcactgggaaaattcaccatttcataaatgtacaggggaaaaactggctatctaaatggggcagggaaaagttacacatatacatcataaacaaaaatcagttccaaataaattagtaacttaaatgtcaaaagtaaaacttcaaaaggaaattcagataaattttaaaattccagataagaattttgtaaataaaagaaagtgacaagcataaaagattgataaaatttaatgtgaaaattaaaaatggttcatcaaaaaacagcctaaaaacagtgaaaaaaatcataaaatagaaaaaatatttgtacactaatacacgatagtggattagtatcaaaaatgcattaagaactcttataaatcaataaggaaaagaaaaacaactcaattaaaacaacccagtagaaaaccagatcaggaccgggtgcagtggctcatgcctgtaattccagcactttgggaggccgaggcaggtggatcacttgaggtttaggagttcaagaccagcctgactaacatggtgaaaccccatctctactacaaatacaaaaattagccgggtgtggtggcatgcacctgtaatcccagctacctgggaggctaaggcaggagaatcacttgaacctgggaggcagaggttccagtgaactgagatcgtgccactgcactccagcctggtgacagcaagactccatctcaaaacaaacaaacaaacaaacaaaaaaccagatcaggagatcaggctgaaaaacatgagatgcataatcttatttgtaaattgggcaatgaacatcaagaccatattattgtttaccaaatcaattagaaaaatcaagatatgtgacaacaagaatcagtgatgtgaataaacacgatttttaaaaaatattgttagatattatatttaatttacactcccactttggaaaacaattttaaattattttgtaaatggtccattccttggtatatacgcaagaaaaactgttatcaggagaaatatttcagaatgctcaaagcagcactgttaataccaaaaactagaaataacctaaatgtccattaacaggaaaatggataaactgtggtttagtcaaatatggattattagatagcagtaaaaatgattgggcaagagctacatgtaacatggatgaatcacagtaagataatatctgaggaaaaaaaagagtcccagtcttgtatacagtatgacatcatttttatataaagttcaaaagtgggtaaaactttatgtttatatgtttatgttttgttttttaaagcaaggcatgataaccataacattcaggacactggttaccactggcgtggtaggcagatggacaaaatagggtgaacaggtagatttaagttacagcgagttttttagttcttggattggttggtgggctcatgggtatctaaagaaagaaagaaaaggagccaagtatgaactaacaatgataatgtgtcacaaaccaagaattataaaaatacaattctccccttcctcaggttagattaggggtccttaatactctcaaagccctgcaaagccctgtcaatgcaattactgtattgtaactatgtatatgtgtctgtgtatcccactgaactgagagctcaaggagggtaggcgttgtgttatcattatcaccagcacccaccagagtatctagcacataataggtttattgaagtaacaaaataataggtaaaaaattgattatccagcaatttcaaagcaataatgaaacagctcaaagtatcaattattattctatttggaagaaacatttaatggaggaaaagagtaaatctgaaggatgtacaactaacctaagaaaataaaacctagactcctgactttgtattttactattgcatattccagaaaatctggaatcttggagataactccaaggttaaagtatgaagttacatgaagcagaaacagtctataaacccgttttaaaagtactagtcacatttagtaaaaaactaggctaaaatataagcagaaattcattaaatagcactaaaaaatatgaattaatttgcataccattttcaagatggtaaaccctttcataaaacaccattacacataggtagaatggcacaaattaactgatattataggtattattaaaataccttacaagagaacaaagactttttagggtggaaaaaacagcataatcaaagattaggagaggaccaggaatgaaatgacttaagtaattcagttaccaaacaaggttattatataaaggatactgtaccatggatagaatacaagaacatgactagaattatagctggcgaattttgaataaatctgtagaaagaaattctttactgtgcaaaacacacagtgaaaaactaaagggaaataaaagcttctcctagtccaggtttctaaggaactcaatacttgtctagaatgtagttagaataatccagaagcagagcatttctaaaacttgggatttttgtaggtattccacaaaataggcttatgataaagtaagtgtggaaaatgatataccaaacaaagcttaaagaggtttcttgctgcaagtcttctcagaggctttattacgctacaggttcttgtgaatctcacaaagaggtatacacaatgtagtatttcccaaattttgtgaccacattgtagagtatcagaacactttggacaacagtgaccttcatcttcttattctgtaattaaattattccattcaaaaataaattgagtgtgaatttattattaaaaacttaagcctgggcccctccccgccccgcctcccggcgcgggtggccgaggcgtagcgctgcgacccccgcacccctgcgaacatggcgctgcgagtggtgcggagcgtgcgggccctgctctgcaccctgcgcgcggtcccgtcacccgccgcgccctgcccgccgaggccctggcagctgggggtgggcgccgtccgtacgctacgcactggacccgctctgctctcggtgcgtaaattcacagagaaacacgaatgggtaacaacagaaaatggcattggaacagtgggaatcagcaattttgcacaggaagcgttgggagatgttgtttattgtagtctccctgaagttgggacaaaattgaacaaacaagatgagtttggtgctttggaaagygtgaaagctgctagtgaactctattctcctttatcaggagaagtaactgaaattaatgaagctcttgcagaaannnnnnnnnnnnnnnnnnnntgcaaaacacacagtgaaaaactaaagggaaataaaagcttctcctagtccaggtttctaaggaactcaatacttgtctagaatgtagttagaataatccagaagcagagcatttctaaaacttgggatttttgtaggtattccacaaaataggcttatgataaagtaagtgtggaaaatgatataccaaacaaagcttaaagaggtttcttgctgcaagtcttctcagaggctttattacgctacaggttcttgtgaatctcacaaagaggtatacacaatgtagtatttcccaaattttgtgaccacattgtagagtatcagaacactttggacaacagtgaccttcatcttcttattctgtaattaaattattccattcaaaaataaattgagtgtgaatttattattaaaaacttaagcctgatttttttcaattcaaagattgaagatctaggttcttacaaacataggatagctatcctcaccaccatctccttcaatagaagagtttctgcaacaattattacatttctatatctctactttcatagtagctataaaacttttctataagaatcaaagttactgtgggtatgtgttaaagacgcattccccaggcataaataagaaaaaagatattaaaagaataaattaaattccatgtatttatggttcattggaaatgctcattataattctgaataccactgttcttcagtatatcaagttaaaaaccccgtctctactaaaaatacaaaaaactagccgggcatggtggcacatgcctgtagccccagctacttgggaggctgaggcaggagaattgcttgaacccagcaggcagaggttgcagtgagccgagttcacaccactgcactgcagcctgggcaacagagtgagactccgtctcaaaaaaaaaaaaaaaccaaacccgtatgttcttttaatttatactatgtatacatttttcttatattagcttagtagttcttagaaaagaaaacctcattaatttgaatcttcttatatgcaatctgtgattattcagacagggtgaagctgaaatttacatttaaattataaattttaaaatgtttgcagtccaattgaatcctataagtaagagtctagaaaaaagttattaaaaaataaacattttaagtgctttaaaacacacacttggtttatagtaaaagctatgtgctatggtttgcatgtcccctccaaaactcatggtgaaacttaatccccaatgtggcagtactgagaggtggggtctttaaaaggtgattggatcatgagggctccactctcaagaatgaattaattcacttatagattaataggttatcaggtcagtggggactggtggctttataagaagaggaagagaagcctgagcttagccttctcatcatgtgatttcctgtgccagctcgggactctgcagagtccttgccagcaagaaggcttgtaccattgtggcccttcaaccttggatttcccagcctccgtaactgtaaaaaatgcatttcttttattaattacccagaagatttctatcataagcaacaggaaatgaactaagatactattagtatgttagcgttatctagctttatcaataaaaaagttctatatgttagaattgctgtcatttcaacatatatctttacaagtatctgaaataagtgagggagatgggttgctagagagtatcttgctgtttctgctcctttgtgggggcaagaaactggattctttgccttacaatgtattagtaaataaaggtaagggatagcaggtctgatgctgctatctttagaagggtctgcttatgaggctggcccttggctggtgtctgagaacttgacttttggcatgttacattgctctgcctgcctgggacacaaccctgcggggccagcttgcgtaaactgcaaaaataacatgatttgtggtgaacacctactttccttctgggtctggaattcaggtgactgtggttaggcacacaggcagaggtgcctacatgaccagaccccagtaaacaccctggattttgagttataagcaggcttcaccagggcagaaaaactacagaagtattactgtattttattgggaagggaggtgcacattctgaaagggagaactttggaacactgagcctggattcttccactgtgtctgatcttttttccttgccataataaatcatagccatgattgaagtgcctttgattcttttgagtctttgtagcaagcaatcaactgtgtggggaggccgtgggacccctgaaacagtaattcactggtttctcattcaagttttaggaagcagagaaagaaagcaaaaacccatatcatgcagggagatatgaataaaaatttagttagctagagtttttgacaaaaaggtgtctttgccaacttttatttctgtatgcatgtatgtattacactgtccttaaaggtgcttacattcttatatatgaaaacatacaaatatacaatgcactgtgataggtagtacagtaggtatatataagggcccatatttttgattagggaatatatgggccaggaaatgtagcttaagatgatgttgaaagatgaggtgacccaaatgatggtgatagtgataggaggtcttttctgttagagggctcagagtatgtaaagatacgctgacttaaggcagcataatgtattcagagaactccaatagtcctctgaatgtattcagtgacactccaagtatggcaatgtagacagcatgaccaatttttggcagcagctataatatgaagtgccctatataccaggcaaggaagctgggtttgtttcttctttatatcataaacaatggagaactactgaaagcaggagtagaaggagttggagaactccctcagtacaccaggtaagaggtgatgaggtaataaaagtagaatgaagaataggggatgactaccattttatttactattcaaagaaatatggtacctatcattcagaatcttagcagattatagtagaacacattccccattgtaagacagtccctaatgaagactagtcataacgggcagtagatataaacatctgtgataattttatttttctaattttgtctatcttaagcagaagtttacattctttgaacatctctaatagctaaaaggagaagcagaacaaatgtgtgttcactggcaggaaaatactgccttataattagaagtttccaccagataatctctacataagaaataaaatgaagtagagaagaatgagtctcacctcattcactctacagggaggtaactgttacattttctgctttaccattgtttatcagttcatgataatctctactttagtgtttcagcttttctaaaactcaattaaagcatcatggtactttatagttgcaattttcattataaaaccagaaaccagctttgcgtacttgtgataaaaagtataaatcaggatatcaaaaaactctgaagcaaattccattttattgtcatacaattaatcagaaagtgataactaggccagatgcggtggctcaagcctgtaatcccagcactctgggaggccaacatgggcagatcacttgatgtcagtagtttgagaccagcctggccaacatggtgaccaaccctgtctctactaaaaacacaaaaattaactgggcctggtgggtgggcgcctgtaatcccagatactcaggaggctgaggcgggaaaatcactttaactctggaggcagaggttgtagtgggctgggactgcgccactgcactacagcctgggcaacagagcaaggctacatcttggggaaaaaaaaaaaaaaagaaagtgataactagtaataatttgaaaaagttatttcaaatataccttaatgttaaaacaggctagaaacaacagcacaaaacaaaacaagtttgagaagcaaaaacaaatttgagacttgtagatgagaatcctcctgacaatgaaccataaccagaaatttccatacatctattatattttttggcttatttcatgacttctgtatttttcattaggaactctacaaactttacatttctgattgttgctatatgtttcatgttcaactgttttagaaactgatggtaaataacagatatatgcctctagagttaagtacaaggttgattttgtcagcaaaacaggttttcagtaggtgactgatgtcattgaggttcactttaaagatctactcaaaaatatgtcccaaatagagaagtgcttgaggcttatatatcatcttgatatgtgacactatttctaaactatttataaggaaacaactttcttgcaaaaatcagaaacctatacacagatttagattcaagtacatttttagttattgagctcaaggaaaaggagcatatacgaataacaaaaagttggtaattgttatcccaatcaaatttaaaaaacataaattgcattcttcaacaaaatatccaaaaagagtaactgatacttaaagtacatcatttcagattatagttactttgccatatgacatatttgaagtgaacatcagtctgcacacaggaaatttcttttcattctatccccatgcagtgcatgcagctaaatatagtttgtggaaagcgacctgctttacaatgcttagcacttagaattcagtaagtccaaagggagtattaactgttaataggaaaggtggttagctgtggcaaaagaagacctggcaaatccatcataaaaaaaaaattatgaaggaacatactgaattacctcattattctatcacctattgttgttcctctgatattaaatctagtgaagggaacacaataactgaaatcacttacaaagacttcaaagaaccaaatatttaaagcattaaggacaccctttttatcatcaatcatctcaatttaaaaaaaaacttttgtttccctttgtgacttcgggcattaagcaaggaatatgtcagtcaactaaatgtatatgaagaaattaaggaaacagaaacactcattgaagctagaatagaaggaagacattgcacttaatcccttttatcttttaaataaatcagaacccaatcctgtcacagtatgggaaactgcactggcttataatgaataccatcctctggaacacgtacatgctcctcaaagctgaggagctctttggaaaataaataattaagccctaagctaattcacttggcctaaccacaagactatataacaaatgagcaaagaataacagggcttttaactccctaggagtccagttctttctctttgagtacatcttttctctctgcaattttctttaataaagagtaaactgcaataatgagaaataaggaaatcatggttacaatgatgactgaataaatgctgccaaatttacagtacaaggaattttggctttaaaagtgagggctatgctccatggtccagagtaggtatatggaaccaaatttctatgaaaataacactttaaaagttattaaagggcaatataggataaatcactctttagggaaaaaattgttagatcatcctaactgaggctataattaaaaactattcaagactatgtgaggacttattcaggaagctttcttagatgcttgttttttttttttcagagagtaatttaggttttctcttgagtttagaaacagtaagagctaccaatcaggccgtcaaatcacttacaacagatttggcattgtaaaaaaaaaaaaaaattatacagcctgggtgcggtggctcatgccggtaatcccagcactttgggaggcygaggcrrgyggatcacgaggtcaggagatcgagatcatcctggctaacacggtgaaaccccgtatctactaaaaatacaaaaaattagctgggcgtggtggcaggcgcctgtagtcccagctacttgggaggctgag

SEQ ID NO: 96120 - DNA, 116644 bp, Homo sapiens
  misc_feature (1)...(116644): n = A,T,C or G
ttttgtttcaacagggtttatttggtcaagatactcacttgtaattattccaaaaaattggagtctgtttgctgttaatttctttgtgggggcagcaggagcctctcagctttttcgtatttggaggtaagcctaccagagatatttttaaaactgttgcaaaagctacttagatggcactaattttttttttttttgagacggggtctcgctctgttgcccaggctggagatggcactaatttttttaaaagattcatatataatgctaagacaagaagtatctaaagtagaaatttaacatttctagaaaagtctaggggtttacaaataagttaaccagttaactagttaactgactaaaatcagttaagcagtatgttacctagtttttagatttaactgtgcatcatttagatggttaaccatctcacataatctcttttattaagacaacatatacagtttatgatttattaatttcttatgtaaaccttttatcactttcaattgtatataataaattggaacttaagtgtattgttatgtagtattggaaatgatacgtagagtgaggtctttgctttcattggaaagtgttccatgagcactggaaatttttaaactatttactcagtagttaatattgtcagtgatttatgataatgacattatgatcaaatatttgaaatcaggatcttttgagaaacctaggaggtatggttggcttcatggaataagttccttcttatgcttttatactactctccattccattataagctaggaggaatagtaaatgaagcccaaggtatggtagaagggaaggaaagactatggctctgtggttacttctttggattgagaattgaggaaatggtccttagcgtttgtgaacttaagtgtttacaggctgttaacccaatagcctgcctgcatcacagaagtatattttaccttagtggttagaagtatattttactttagtgattactttagtatattttactttacctgttgatcttattcttaggaaaggtgctttgcgagtataaattttaaaattctaggtgaccacattttactaaattttatacatatgttcacaagtttgtcacgttcttgtagaattccagaatgagaatatttttattaaaataatacttttgcacaggaaactatatgtcagctaagctgttaaaagtttttggcaggccgggcatggtggctcactcctgtaatcccagcactttgggaggccraggcaggcagaccacaaggtcaggagatcgagaccatcctggctaacacggtgaaacaccatctctactaaaaatacaaaaaattagccagaagtggtggcgggcgcctgtagtcccagctactcgggrggctgaggcaggagaatggcgtgaacccgggaggcagagcttgcagcgagccgagatcacaccactacactccagcctgggcgacagagtgagactccatctcaaaaaaaaaaaaaaaaagtttttggcagttgtgctcttattatctgaaacaaaatccagatgcaaatgaactctttgaatcctttcctttctgcctgtttctacctgtaagccctccgggaagattctgtttacaactgtatagctacttgaccaccaagaaagaagaaatggagtatgcttcccattctctccttaccataaatttgtctattattattgatgattatttttctttctgttttctttatagatataaccaagaactaaaagctaaagcacacaaataaaagagttcctgatcacctgaacaatctagatgtggacaaaaccattgggacctagtttattatttggttattgataaagcaaagctaactgtgtgtttagaaggcactgtaactggtagctagttcttgattcaatagaaaaatgcagcaaacttttaataacagtctctctacatgacttaaggaacttatctatggatattagtaacatttttctaccatttgtccgtaataaaccatacttgctcgtatataccccctgcctccttctgttccagtcagccaacatatgtacataaaagaacacacaaattcaagaagttggaagattaaattatctgcttatttagtgtaggatggtcaggtagctagctataagtgaaaggaaattttgctgaagagactgagaaatgggtagtggaatgactatcaagatgacctcaaactatttaaaaacattttaacttgccatgaagaatcttgatgatttttgtataaatgttgtataaaattcttttacagctacagatttttaaataggatcattgtaaagattaatgagataatgttttaacatagtgcctggtccatgataagtgttaaatttttcaattaccctcagtaactgataatgtagcagaaaatactctatattcagacagacctgaatttgaatcccagctctatgacttatctgttgtgactttttttttttttttttttttgagacagggtctcgctctgtggcccaggctggagtgcagtggcacaatctcggctcactgcaaaccctacctcctgggctcaagtgatcctcctgcctcagcctcccgagcagctrggactacaggcacacaccaccacacccagctaatttttgtatttttgtagaggtagggttttgtcatgttgcccaggctggtctcgaactcctgggctcaggtgatctgcccgcctcgtcctgtcaaagtgctggaatacaggcatgagccaccatacccagcctatgctgtgactttagacaagttaggaaagtacctagcagagtacctgggacataagtaggttttctgtaaatgtttgtgacctttggctccgttgtgaggagagactgagcatacattactccacgctacaaataattaactatctatttgatttgactttcagtgtggagtgcagagctttttttctaaaagtgctaataaagccagtcctcattaaaaatatagtcagatgagtcagcaaagcaagttatttcaaaatttgaagaaatgagacaaaacaactttttgagtaatactataacctatgaaaatttggcagttagcaattgaaaaccttgtactttatcatctgtcccttaaccatggcctaccattgaggagaaaagattagagagcttgacataggccacaatgaagaggttctgaagagtcaaactattattgctttcatttcataaaccacactgttaaattcatttgtgtgtttggcatgggtgtgcacacatgtgtttcctaggttaagcatttaggaaaaacattatgaaatatgacatagacacaaaaaagtttattaaaaatttatgtgagcttggtgtttcacttccttttcattaaaacctcttctgtgcggggtctcctaagcccctcttgtcagtcaaatttgttgtagcatttagatacaatcataggcagtcctcctttcttgtttctcagaagtttcattgacaaacaaccatcacatgcttcttttcttttctgccccaaaactcttaatctatccaattttttaatcttaaaaattaaatcttggccaggtgcggtggctcacgcctgtaatccgagcactttgggaggccaaggcaggtgaatcacctgagggcaggagttcgagaccagcctggccaacatggtaaaaccccgtctctactaataatacaaaaattagctgggtgtggtggcgcacgcctgtaatcccagctactccagaggctgaggcaggagaatcacttcaacccaggaggcggaggttgcagtgagctgagatcgcgcctttgcactccagcctgggcgacaagagcaaaactccatctcaaaaagtaacaatatgtatcctgtcaaaaactctcattgccacttggaacacatagcctagttatcagtttcacaactattctcaaagacttagtaagaatatattagaagtccttactatcaatgcagttactgaactccgtaaaaataatttccacagtggtgcaaatcgattagtatagttgagttgaattctttatcacagctttttgacaggtctttattgatagcttcactatgtaagttttctttctcaatgccaagtctgacagccctgggtttcaactcaactctgccacacattaactgtgagactttgttaacctctgtctctgacctttaatattttcaagagcaaaatgaggataatcatagtactgacttcataggattgttctaaagattgagataaggttttaacacagtgcctggtccacagtaaatattgaagatatggaaagttcaggaaacgggccaggcgcggtggtgcatgcctgaaatcccagcactttgagaggccgaggcaggtggatcacctgaggtcaggagttcgcgacaagactgactaacatggtgaaaccgcatctctactaaatacaaaaaaattagctgggtatggtggcacatgcctgtaatccgagctacttgggaggctgagacaggagaatcacttgaaccagggaggtggaggttgcagtgagctgagatcacgccattgcactccagcctgggcaacaagaagaaagttcagaaaatggtaatcttattaattgaaggtagacccagaaagtacttttctttaagtactttaaaggaagttttaattttactacaaaaaggatatactgtgttaacctatttgcacggtttctgaactaataactttatagcagaaaagaagctgcttggggtagaggagtagtaggtggggtggagaatgctcaataagagataaattctttagtctttttttgtggtatggcatctcttttaaggaaactttgatccaaggtatgtcagtgctgctgtttcctcatagtaaatattttcttttttaacttataaaatcatagcgaaaggttgaatgttaatgaggatggacctcaaagctaaggttcctttctgtaaaacaaaggtctctactggagcctgtttatataatgaagcagaaatagaaaacactggcatttattaagaatagctctccctaaggggattgtttaattaaatgaggtatgattctaattataagactggtttccacaactcacaccagaaaattcactcaatgaacataattaaatgaccctcttgttttcctccctaagacaactgtgttttacaacatttggaagtacacagtaaacaattacagagcggggctttataggagaacatgtacagctttttaaataagactttttaaattccaattttaaaagctgtgcccctaaatgataattgtggttgtgatgatatacataagaacatttagaaaatcaacacatgatttaagctgttagaaaacacaccagcctcttaaaatacatttttccagtgtcacatcagataaagaaaactcaaatccagtgcccattggatttcaagttatctttgggataaatttgattaaaagcgtgcacttgaccagtcagaaagggcaggtatataattcttcaaacaaaaatttacctcacaaatatatctgaaggtaagtattgaatttattataactggtaaatttcatagtcctggtacaagctgtaaccactattgactaaaattaggtgtttgcttgctctggagatacttctgatgatcacctaccaactattgcctaatttcaaccatcctccacatggccaagggaagaattgtgtaaactactctggggtcatgtcagtctcccctgacccttgcctcaaatgtgcggataagagaacctgaaacagccagtccttccttgtacagtagtaggccactcaggttggtgggggaggggacggcagtgccacccaatcagaaacatggtcggtgcccgtggaacaatgagctactgatgagggtgtggcctggaaaacggcttttagacaaaactgtcattttatgggtcagctatagacagacatggcgcttcagctgtcttcagaataatgtcacccggcctcctctcctgtcttctgcagtcttaaaagacctagtccctaactgaggtctggcttttcctcagccctggatgaagtggaggtatgtggaagtaagagtctcagcagaaagattgattgcagagctgaagatgagggcgaccgtcaggaaagaagacagctattgcagaggagtgggaagcctggggctagaagtcagggttcaagtttgtgtatacctctgtgtcagtcccttacatgagcttagaagcttgaaggcttaaatattgcctcaccttctcaacctggatgctctgtctttctagcttactttctttatttgcctcttttctgcagtttctcacgtgatatcctcctttttatcagtcaacaactaccaagtgcctacctcttgaagggggctctggcaaggtgctgtggagtaaacaaagatatgtagaagatggttccaaacggggagcttacaattcagatgaagacaaaatagaagcaattcaaaagataatcaaggatatttgtatgggaaataagccacttaagtgtagacattaagagccacaatagctcagaagaaaaattaccatggctagagtaggcaagcaagctttcatgacaggtaacactgtgcctttaagttcagagtatctccctctttggactcgtgaaacctgactttacatgtaggtgaaaagttgaatataaaatctattaggaaattctagaggagagatttagagaaactgatgaatataatcgaaccctaatttctcttttcatttttgggtactactgagttttctttactcacactccgcattcaggaatccttcttggtttatctttcgggcctcattcgcctgcttgccttttgactcaggtatcctcatttctcattccaaggtgcttccgygctttgtcagtacccatgctgttcatgctgtattcttgatgtgatagaattggctgaacagttgataagggtaccatcaacatgcattgaaagtgctcttaaattaaacctacatcttttgtctaggtcatatacatccccaaagtgctataaagcgtatacaaatgggatatagcatgatatagtagaaacaacagggactttcaagtcccacagacctggatattccagctttataacccagagcaagttaatacctctgtgcttcagttttcatatctatagaaatcaggtctacttcatagcgctgtttggatgattaaatgaggcaacctatgtagaattgatacggctccgatgagtggaggaacaccaaggttcttagtcctcatcccggtttagataaaacgacacagacacatgtggagtgattttaaggatcggagagtttaataggcaagaaggaagaggaaagagggaagaagctcccccatacagagacagagggaggggggctccaaagccgagagagggaacccccagtggggtggacgtcagctaggtatatattacagacgctggaggaggcagtgtctgatttgcatagggttcaggggattggtttgaccaggcatgtcattcacaaagcccttgaaaaagctagccctctcaccctagccttttaatatgcaaatgcagggtgccatgatgttctacacacgtgggagtatgtggaggtggccatgttgccaggaacatgtggggcaagggaaagaaggcctccggaatcgccatgttgggtgggccctgtttctaatggccttcatttgcttatcaaaggttgccggcctggctctaagagccaaggctttacaagaaattttctggagatgctttaaaaaatgaaaatttcccaaggaccccttttcctctctatctgcctaaaataatttcttaataactcctacaatagaatgcttcacataaaaaggtcataataaattataattacaatgtggtatgtgcctgtagaaaggtaaatacagctatcactaatcattttgtgatgttgcagaacttaaagcagaaaactatatcttcaaaaatagaaaatttctattgtcttttatgggtgttcataagaaactcccagatatttattttagatctccctgccttttaaacctatcattttcttcttttagtttcacatctacatatgccatcttaatctcaaaatgcatgtactttccttgtttggtcatcataaacagaaaaatctgtccaagttcattcacatcaccttaattaaaacaatagaatcttaacaatcatctaattcatctctacactgactaaaatcacctctgtttgaaaygcttgttctccaatgccataaagaaatagcacttgaacataaatttatttagtaagggcatttttacttcctgcagagagggtatactcgccagcagttttgccacgagagtacactgaacaaaggagacggggtcatttataacctgacacgttcaccctactgcccattggccggaacaggacctcacattctgtatttgtcccgatcggctagcaacttagaacttttaaaagaggcaaaggtagaggagaacaaaagaaggaggaagtaacttgtggaatgctgagaaaagtaaaaatacttttaaataaggaagaggaacaggctatgacctaatggttgcttggaccagtataagcatgccagggcaaatatttaggctacattgtgggagccaagaacataaagtacattgatttctttattayggctrgcrgatatttaagaatgttagcacaggtctttgaataaattttgcttttaagakaagttactatttattcctaattagacrgggaggaaagtctttgaagaggaacctctactttactttttatacctctaccctcacaggtagatagctattcaacacttcctaaaactgcccagtttgaacactcattcttacattgtttatatttgtccttcggtgattgccagtcattgatcctagttgatcctgagcaacaaagaataaacctaacccactttccatccagtgttaacaactttagcaaaacagtctatactatgcatgtgaggagagtgtggtattgccaagattgaaggggctgatagtagggctgctagaaagaatgcaatgtttggaatatatttatactaaaaaattgtttatttaaaattcagatttaactgagcatcctctgttttcattagctcagtctttcaatcttacaagyttggtagctaaagaagtcaaagttgagccagtgaactgggggcaggagagggaagaatagagctacgccctgctcagttctgctcagtcctatcttagttctctggctactcagcacatctgtggaagccacttcagagcacccatgcctacggaacatactgtttacagtcacttattctttgataactagctccctccactgaagaaaaacacaccaactttcctttcccactgcatacttcccatgaactttaatcttgctaacccaaaccaaatttctacctcaaggagaaggtagggaagttgttctttgattgcagggtcccacattacaccttgcatacacacccatgtcccccacttagcccacgtccaccacttaccccacaactttcacagttcagcccaaatatttgaagacaactacmattttaaccaaaatgtcataattttctgacttayttccagtctctgccatcattcctcacattccagagtcaatgaattttaaagaggtcaatgaacttcagtcctctggattagatttgaacacttttatgtatcttaaaattgcattgcatccaaatagctagttaacatatgaaaaggtgcttaatctccttagtaccaacaaggaaacacaaaaccacagataccattgtagcaggacgagccacagacaaaaccccttagacacccgggttaaagaaggaagaggctttattcggctgggagcattggcagacttgcatctcaagaactgaggtccccaaagaaacagttcctggcccttttaagggcttagagctgtgaggggttccacgtgaaagggtcataatagattgagatctgtagatagcacatgtggttagaatgggggttaatcttttaacctcagacctggtcatcagtggcgccggctgktcttgccactgacttcattcctgtgtttttcagcttttacttcctctttctcttcagagacaagagacagtaagagaaatggcctgtctcctcaccaccacttacctagcaagatgactaaaagttgaaaagcctgacaaaataagtgttggctgagatatgtagcaactgaactgtcataccttgcctgagggagtgtaagttggtaccatcactttggaaagctgtttagcaagatctactcaagcaggggtatccaatctttcggcttccctggggcacaattggaagaggaagaatcatcttgggccacacataaaataatactaacaataatgatagctgatgagctaagaaaaaaaaatcacaaaaaaatctcataaygttttaagaaagtttasaaatttgtgtkgggctgcattcaaagccatcctggaccgcatgtggcccacaggacatagcttggacaagcctgtactaaagtttaacatgtgtataccctatgacccagcaattccactcctgtgtatatacccaggagaaatgcatacatcttttcaccaaaacacatgaataagaatgttcttagcaccattattcataatggtctaaaagtgggaacaacccacaggtcaatagtatagtggataaatgttttgtggtatattccatcaggtgatggaatactatatagcattgaaaatgaacaattattgatatacaacaacatggatgaatatcacaaacacaaaatatgtagtatgatttcatttatataaagtttgaaaactggcaaaggtgatctatgttgttagaaataagaaaggttaccttcagggaaaagagaagggtagtgacttgaaggtggcatgagaaaaacttctggaaagctggtaatgttttccttcttgctatgaatgggtattacacggatttgctcaccttagagtaattcaagctatacacttatgatttgtacattttcctacatgtatgttatgcttcaataaaagttttttaaaagatagcactaatttgcagtaaatctagttttttagcacctcgtgcttatgcatttgattttgttaaaaactctaaacacagcactttgcacttattcttttgaaatttcattattttggttgattaagatgtattaaaatcctagctctgtcatcagtgcattagttctctcactatattttcaaattttattttccctcagctttattaaggcaaaaatgacaaaaagtgtacatatttatggtgtacaatgtgatgttttaatatatgtatacattatgaaataattaaatcaaggtaattaacgtatcatctcacatacttaacatttttgtgtggtgagaacagttaagatctactctcttagccattttgaagtatataatactttattaactgtattcaccttgctctaggttagatctccaggactttttcattgggtctaattgaaactttgtatccttcagccaccaacatctcattccmcccacccaaccccagcctcaggcatcaccattctactctgcttctatgattttgacttttttagattccatatataagtgagatcgttcaatatttttgtctttctgtggccggcttatttcacttaacataaggccctccaggttcatccacactatcatacaagaaagaatttccttctgttttacggctgaatagtactccattgtatacattatccaatgttttctttatccattcatatgttgatgaacaattaggttggttccatatcttggctattgtgaatagtgctgaaataaacatgggagtgcagggatactgatttcaattcctttgggtatatayccagatgtgggattgttagatcatatggtagttctatttttaattttttaggaacctgcatattattttccataatggccgtactttcaattatatctttatcaaagtcttctatcgtgcccatggaggcttacctctgagttgacaccagaatactaatcaatttccattaggtgtgattgctaaccagccaattatattttctttattcctataattttgtatattttactcacaaggatatgagaaatttggccaaatgccttaaagtcaatatatacattgtctatagcagtctcttgatttaaaagtttaataactcttccaaaataggaaataatgttggcttgctcttggctctgaatccatttgactccttttaatcacctcttgctaatctaaataaccattgaggctgctcccaaatattccaactctctttcctattgtgcacatggtaggagtgcacttccctgtctacttgaaactaggcatggtcatgtaatttgctttggtcaatgccatgagtaaaagtgaaatacgtcacttctgggagtagaatgagtatactccactacatcctctttcccactaccttgacaaccagaatattccagtttgggtcccaaagtgaaggcaaaaacagaggagaaccccatacaacccacaagggacatgtagtrtgagcaagaaatgaacaagaaataagcctttgttatttcaagccattgagatttcaaagttatttgataatgaaacataacctgtattatctcaacaaatacattatgtttactggtctgtgttttctgggatccatgagtagcctcatcttttgaaattcaaaagagaatgtgcccatctatggtattccagcccatctcttgttctccatggttttttgagattactgacattacacctgtcagttctttcagtatctgtagatatatgttgtctgggactagctagaatttatttaaaatgactgtgtgctttagcactacttatcttggatttcaattctttcttagcaatgcttgttatacttttcaatcctccatggtggagaaggtagaaacaaaagaaaaggtgtatggtacaccatacttaagcttcatccttattcctcttttattaattaccttgttttcaacaaagcctttaaaaatccctctaggttttcttaactttagcattttttgtaagtctttcattctcgacattcaattttcttgtacctttctttttattatcattattattattttagagatggagtctcactctgtcacctaggatagagtgcagtgacacgatctcagctccttgcagccttgacctcctgggctcaagccatcctcccacctcagcctcctgaatagctgggactacaggtgcatgccaccacacccagcaattttttttttttttttgtagagatgggatttcactatgttgcccaagctggtctcgaactcgggctcaagcaatactcctgtgtaggcctcccaaagtgctgggattataggcacaaaccactgcatctagcatctcacacccttcttaaaagttcatatagcaccaaatttactatctgaagttatttatttgatttaattttatctattgactgttcctggcacatgctgtggtcttttgctgcatttttaatgctaccctttttttttttaaaccttagttatatgtttctttcttttgttcacttcttaacatttgagtttgccaggacttttccttttaaaggttatccaatatgtaacatttagcactcattttttagaatactaaatacatttttaaatgtatactatatacattttaaagtttgtctgttaaatgtacaaatatttttccctgagttattttttaaatacttccccttaaatctaagggatataagcgactgtctcaattttttcctctaatactctaatatatcccaatatgacctactaacaagttcctctctgctggtcagaattaaaccaaaaataacagttccttttcttaaaaaaacaaatcctcttatattttctgtataacctattccagtaacttggattgctctgaaaaagtaaagggtgtttgcttttactgttcaggctggtagagcatgatttttacaacatttaggcatgagcatttaatctgccccagcagctacaggaaggccttaggaaatcctagttttctcagaactaactgggcaacaaattgaaatttcagcatttccttccatttacagcttaaggtcttccatctttccagctgccacacacacacacacacacacacatttctgaactcttttcttccatttatttaacattatacctttatagtcttaatctcttgcctatatacaaaactctaatactcacttacatataaatacactcacacacacgaatcacatctacactttttttttttttaaagagagaaaaaagtaaaagaccaaggtagagagagggtaaaaggaaacatgaggacagaagaaaaagaagtctggcctgagtgaatagagcttaacagcccactacaactggacttgccctgcgagggcctaccccttcctgcaaatgagttgagccgttcagctaccctctttcaccccagcctctttgtaatggagctcacttatgcaacagctgttcagggtgggagggttcttcctctgtatagaaattggcccttttgaagtgtggctcaacaactctggcattttcaccactataagcaggccgcaggttagaacaaaacaaatggagaaagagcaataggaaaatgagcaaatgaatatatcagatttcctctatttcaattttctttttagaagacctatttggagactgcttcctgtcaccataaaatcctgaacatttgtcttgaacatgaacactccaaaagaagaattccaggactggcccatagtcagaatagcagctcatttaccagacctcattgtctatggacatttctccccagagcgaccctttatggattattttgacggagtcctgatgtttgttgatatttcaggcaagtgcaaaagggatgtttgtttaatgtggatgagcaacaggctcgcgtgggaattcacatgcagagcttgattgcagagtagggaggccattctggagcccttgggctgtcacagcagatgtgctccactgagaacacaagagggaggaaatagcttgtggccctggctctctctcatcctcccttactcaggactgccagtcataggcatatctttaacatgctcaagtcccattctttgctccagtatctctgccccaacttcactgactcatcctctccagccccaagccccatacacatcccagtcaaaattgacctcaggaaatgatctccctagatgatgtttacatcttactaataaacttgccacctcttcagaagtgtttgaaatgtgtgtgtttttgttaccacggaatgaaaattttattcccagttaaagaagttgcagttatcacygtacagttgagaatttggaagaaagaaatatctggagccttttcctgacccctaaaataatagctagaggaggctgcatgtctgacacttgaccagccacaaagatccttaagaagaaactctgcctgtttttaaaagctgaggccrccgggttcggtggctcacgcctgcaatcccaacacttttggaggccgaggagggcggatcacaaggtcaggagttcgagaccatcctggctaacatggtgaaaccccatctgtactaaaaatacaaaaacgagcctggcatggtggcgcacgcttatagtcccagctgctcggaaggctgaggcaggagaattgcttgaaccyrggargcggaggttgcagtgagctgagatcacaccattgccctccagcctgggctacaaagcaagactctgtctcaaaaaaaaaaaaaaaaaaaaaaagctgaggcccgctgccttccagggtagtcctcttctggctctgtttgattcccccaagcagccaaggaaaccagctgcacatttattccaggttttactgcaatgactgagaagttcagcagtgccatgtacatggacagaggggctgagcagttggtggagatcctcaactaccacataagtgcaatagtggagagtaagtgttcccataggtttctggcttgagaatatttcaattcattgttttttccgtagttgtcaattataacctgatagagtacaattgcttagcactcctcctcttccccatgaaatgtgtataaaaccagtcttttttgaaatatgatatagtataactgaagaaataaatataatcaaacctcactaatacagactatttgagggaagggatgttttgtgttagagggctgaattatacactgcttttaaaagaactgtagtagtaatacttttagttatatatccaagtatttatatttatttttatttatttatttagagacagagtcttgctctgtcgcccaggctggagtgcagtggcacaatcttggctcactgcaaccttcgcctcctgggttcaagcaattctcatgtctcagcctcccgagtagctaggattacaggcgcccgcccccacacctgtctaattgttgtatttttagtagagatggggtctcaccatgttggccaggctggtcycaaactccwgacctcaagtsatccacctgcctcagccccccaaagtgctgggattacaggtgagagccagggtgcccggctatttttatttattaatttttttttttgagtcagagtctcactctgtctcccrggctggagtgcagtggcacgatctcagctcactgcarsctctgccycccaggttcaagcgattctcctgcctcagccacacacgtagctggggttacaggcgtgcgccaccatgcccagcaattttgtatttttttcagtagagatagggttttaccatgttggccaggctggtctcraactcctgacctcaggtgatcctcccacctcagcctcccaaagtgctgggattataggcgtaagccaccaygcctggcctatccaagtatttttaaaagccagcatctataaaacccaaagatagtcattaagagattgttgtatgagtagataaatgatttataattagcttctcaataatttgtctcctaatgatggatgctgaagcacttagagtgaactgaaaactttagtccccttgtcaacctctgcctgccatcttgtttgcattrttaattcaaactattcatgaagacaacggtttactctgttatggtgaactcctggcctagtgttttatcagactctgagttccttagtaatatcttgatgttacccactagacaaaatttaatgcttcataaaagcaggaactatggttgattcctttctgcatctgacttggcacaacaggtgcttaaccaatccatgatgatgcgtaactaaaagagagaatggccatttatgccataccgtctaaataaacaaaatacaaagttggtaataaccaaaaatgcaagtgactatggttgtgattttcccattccctgactcctagtttttgtggagtcctgtcattcatccacccacccatgcttacacaagccccagcctataacatatattgatcaataaattaattaaaagcattccattatcgtgggaggagggcagctgtcttcakacctcatcagaaaccctagctgcctttctcctgtctttccccattcacagaaatggagcatagatgtaaactggytccacgtactcattctccacttgaggaaacagactcaaatgggttaagtggcttgtctgggatgagatctttagtataagcctattctctgaatcactgttcttttgacctagtttctattccactaagaaagaatgatgtttttttactaccttyaaggaatcagggtttgatttaattttttttttttttctcagaagtgttgatttttggaggagacatcctgaaatttgcaggtatgggggcttactaagatagaaggggtaagaaaggagtgctgaggtgcctgtgcttctgtgttggggacaaaggaggcatcctagagaagggagtggccaggagataggctgaggaatgcttgatgagtaagtttctatacagatctcatacaaaatagattgatccccagggcaggtcaaaagcccgcggcatgtctctctctgaaggtgatgcactgctagccctgtggagggtggagcgaaagcagctgaaaaacattatcacagtggtaattaaatgtagcctggagatccatggattgtttgagacccaggagtgggaagaaggcctagacatccgagtcaagataggtaagcatttgagaaggaataaatcctacggcagctgggatagggtcttgactcctggggcatctctctctcccaaagagaagtagtagaacatggtggctcagccccatgatgccctgaactttggcatcaggacaatcagaatgtgaattttggcttcctcacataccagttgagagaatttgggttaatcataatatctacctaataagctattacaaaaagtaaattagttggtatggtagttaatgcataggaaccacccaataaaatagtctttatgactgctactgctgttattattattccatcttgctgcttgtcaaggttgtgcagtataaaacaaaatagagactagcttgccattacatagtttcagcaacgacatgagactggtcaccccctacctcataagaatgaggtgtaggaaaagcttaacaggtcagcctgcaacacagctccagctttacacaaggcttcttaaagttatacatataatatagtaatagtcacacatatttccttattacattgcagacattacacactatgcacgtgcaaacattacgcacactatatgacagtcctgagatacaggcatcattgtatccatttcatagatgaaaaatgagattctgagaggtataagtaatgagtaacagagttatggttggtgctgttggtgttagcttccgcctaactaaactttgcaaaacttagaattctcacatgtcatacctgataggatcatcagcagttatacaattaactgtttctcagccttctttaacctaggcccgcttttgatgttgttaaaaatttccaaataaggccaggtgcagtggctcacrcctgtaatcccagcactttgggaggccaaggtgggyggatymyctsargtcaggagtttgagaccarcctgamcaacatgrtgraaccccgtctctactaaaatacaaaaattagccrggcgtgatggcgggtgcctgtaatctcagctactygggmggctgaggcaggaraattgsttgaacccaggaggcggaggttgcagtgrgccgagatggcgccattgcactccagcctgggcaacaagcgtgaaactccatctcaaaaaaaaaagcccaaataagttaaatattttgttgaaaaaaaaatcaaagttattataatactgaatattttttctaagttagtacccaaggagtctgatgtgttatccttcttgagaatgatgggaacccagccccctcttgcatgctgattggctgttagtgaggtgggtcccagcacctttttttagagtaagtccaaacatcagtgtgtttcagatagaaaacaaactgtatgtagaatcaggggggagtcagccctgacaaatcagtatagcagagagcgaagataaaaaataaacattgattgtattacagtcatttgaaagaaatgtgtgtcacttacagttcatttatacatatattttgtgtacatgtcatattatacaatatcttcttctgtcacttaggttccaaaactttcatttaccaacttaaaagcaatgagagaaatggttgttgggatgggatgtgtaactgtcaaatgcatacttcctttcccccaccctttgttgtctaaaattcaaccctaagggattatttttagttacagcttcaatctctgctaaaatgcaaattctcccaaaataagaattattaaaggtattccctgttgcccttaagtatacataattgaagaaaaggtaaaaataactttggggactggtaggaccatgtagtgagataatgttacagacaggcaaaatttagtggtagaactttctagctttggaagaaggggagctttggaaggcccgagcccaaaagaggtatgccataattcctatgtaaagttttagaagtgagattttgctctgagatagtatagtcccaycaagattatggtttttccaaaaacctgtgctgctgggaaataatccagaacttcttgtgcaaacctattccttgccttcttgccaggactggctgctggccacatcagcatgttggtctttggagatgaaacacacagccactttctggtgattggtcaggcagtggacgatgtgcgccttgcccagaacatggctcagatgaatgatgttattctgtcaccaaactgctggcagctctgtgaccggagcatgattgaaattgagagtgttccagatcagagagcagttaaggtgggtgtgatgctgctacttacagaaagttctgccagcctgtaacagaggccccctgccagaagagtcactgggcacgctggtttcataaagctcctgggctggagattgggatggggtcagtctgggttaggctacagaggctttagtccagggcagctcctctgggaggagcccaggctggtgagcttgaggaggaaatgattaggcttctttatgggtaactgaggatatggaatttggggattgaggccttttgaggggctagcgaccttgcttaaggaaccagaagggtctgccggttcatccaggagcagaggggaatagttttaaaggctgtcattgaccctcactttctttacccaacaccctcctaacccaggatgagggatcactgaaggtaaaggttggagttgagcaagtgcggcgaagttcagtgatagaagagagacttctcttcctgtggctctgcctagtagaaaacattgtggttaagttgcasattgactataagcagaactgtccctgggatatggacaattraaaaagctgtgctttgagggtatgaaagtggaagaaaggtgtgctgctagatgagccaaaggaatgggactacgcggcagaaagaaagaaaagacagagaatccgtgcagatgctggtcaagataggaggcactcccacactcatgcatcagcctacaaccctcaccaccaccacccactcctcactcttccagcaagacatatccagcctgcatggcctagctggcttatagcaatagcccattcccatgctcttcaatcattctttttttaaaaaaaaaaaacggagtctcgctctgttgaccaggctagagtgcaatggcgtgatctcggctcactgcaacctccgcctcycgggttcaagcaattccctgcctcaaccttccgagtcgctggaattacaggtgcccgctaccacgcccagctaatttyttgtatttttagtagagacggggtttcaccatcttggccaggctggtcttgaactcctgacttcgtgatccacccacctcagcctcccraagtgctgggattataggtgtaagccaccacgcccagcctctcttcaatcattcttgatacctttaaaaattgttttaactttgaattcatgttagacttacagaaaagttgaaaaaataatacagagtttccatatatccctcacctaccttcccctaatgttaacatctttcataacaagactgcaatagtcaaaaccaggaaattaacattggtacaatactatgcactagttaaagaccttatttgaatgtcaccagttttcccactgtggtccacttagtggaatgttccaggactgtatgcatgatctcacattgcattttgttgattttttttttttttttttttttttttttgagacrgagtctctctctgtcgccccaggcttggagtgcagtggcgcgatctcggctcactgcaagctccgcctcccgggttyacgccattcycctgcctcagcctcccaagtagctgggactacaggcgcccgccagtacgcccggctaattttttgtatttttagtagagacggggtttcaccgttttagccgggatggtctcgatctcctgtcctcctgatccgcccgcctcggcctcccaaagtgctgggattacaggcgtgagcccctggcgcccggccttgttgatatttttgatgtagtctcctgcagtctgcaacagcacttcagtggttccgttgtcttgcagtgaccgtgacacaagagagttgccagccgatgttgtcacacacatctctggttagcactgcctgatgctttctctcatctcttctgcatctccaacaacatatctctctctctctctatatatatatacatatatatatatttttttttgagatggaatcttactctgtcacccagtggggagtgaggtggcatgatctcagctcacttcaacctctaactcccagtctcaagcgattctcccaccacagcctcctgagtaactgggaccacagacatgtgccactacacctggctaatttttttttttttttgtatttttggtagagacaggatttcaccattgttacccaggctggtctcgaactcctgagctcaagcaatctgcccacctcagcctcccaaagtgctaggattacaggcctgatgttttctctttattggaccaagtttatgcttttttttttttttaaccaagaataccacaaaaatgagatcgtgccatcctcagtgtgtcatcacatgtgtctcatgatcttgatgtcttatgactggtgatgctcctaattcctttttggccatcagcccccgtcctttaacacttataaggaagaaatggtgtgcagtttaaccaggttttatttgaattaaaatgttatgaaggaaaaaaagcaggaaaaagttctaagggcagaaaagtataagattagtcccccttggaatgaccctctctgtacatataccaaacattgagatgtgagtgaacactgtaattggaaagattttttagattttcaatttaaaatttcaattttacaaatcaaatagtcttggtgtttaagtgtgccaatcactgttcagtcaraagcatactctctttctgctaagaaattacacttcaaaggattaaacagttctcagaataactgaaaacttctcatttgcttttatttaggttaacttcttaaaaccaccccccaattttaattttgatgaatttttcacaaagtgtaygaccttcatgcattattatccttctggtgagcacaaaagtaagtacccaccatggaaaaatgcctttgcctctaccagtggtcagtagggtcttatatcaatgccgacagcttcattactggtgggtgggytcctcaacacagctcctggtccttaccagcacacaaaggggacctacttcccattctccgggacagcaattctaagtatgacactccccacaccatccacctctccctaggcactgactcctttccctcatccatcaaacattaataagtatcccctaggataaaagaaaaagtaaagcttctttccgtgctgctttcccctcctaaccttcaccaataaacttctaggaaaagtaatctgtaaatgtatttatacctgctctcatgtccccttatttatttattcatccaataaatattgattgcaagcaccttgatgtctgtgctcacctgctcttcagtcttgcaccgctgacacctagcttctacgctagtcccctgctgtctactgagactgtttatgtcaaggccaccaaggaccattaatttgccaaaccaggtgacctcttctcaggcctcatcctagatggttgaccatagcttatgctcttttcttggacactaccttctcctttttccttgagttcaaaagtattattcttttctagttttgcctttacstctcaaatcacctattttcagtcctctttgcttagtttcctttccatgtcttaaatgttggtgacttcaggtatctgtctttgaccttctagtcttctctactcacttcttagtgaaccatttattcgtgcttaacttccatatgagtaagatgaggcaagtgagaagactgtatcacaaaacttaagcagacactcactctcaaggtcctgcaagttgcttacatcacccgagtctcagacctaacagccagaattcgcttcagtcttttgtcctgaattctaggacagatttttgtcctgaattcataaaaaacaaacaaaataccctacctatgggcgacttccactggatgtcaaataggcatctaatattaacgtatctgaactttagctacttacccttccctgaaaactccatccaagtgagaaacatcagaaacatctttgaatcattctttctcatcatttatgtacaggtctggagtattttagatgttacaaatagaagactgtacttttacaaagccacaataggcagtggggtggggagtggggagactgtacaaacatkgatcaggaaaggccaagaacctcagaagctccagagatgaaggagaaagcctcatgwcattacccactccttgagctttactaatgccatctcctgggtcttaatggtaccttctataaagggtttcttcaggccttactttgagcaccataatactgcaatgcaattcctttttttttttttttttgagatggagtctcactctgccaccaggttggagtgcactggcgcgatatgggctcactgcaacctctgcctcccrggttcaagygattmtcctgcctcagcctcctgagtagctgggaatacagaggcgtgccaccacacccagctaatttttgtatttttagtagagacagggtttcccatgttggccaggatggtctccatctcttgacctcatgatccgccygccttggcctcccaaagtgctgggattacaggtgtgagccaccgtgctcggcctgcagtgcaattctgatgttataaccacctggagttagtgcaggatttcattggttgaatcctctacaaacttcagacactagctgcaagctctgggatccccagaccaccggcacttctgaccaactacctacaaatctggggatctccttaatgccctcaggttcagtaattcactgaaatgactcacagaactcagcaaagtgctacacttacagttatggttttattataaaggctacaaatcaggaccagccaaattaaacacacacacacacacacattttttttcacattatcattttcttccctgctgaaaaccctttgccatttctgtctcccttattttttgactccctcaaactcattcctaccatctcttatcagtctatcctagagcataaaactatcaatctttatagtgaagggaaccayagagatcatgaagctcaactactcttttcccaggtgaggaaataggaggcaaccagggcagcaaagtgacttctccagggtcacacagtgaagcggtatcaagcctgagatcagaaaccagtcttcttaatgttattcctgctgccctttcaactctaccatccccttcattctgtcaccatgctcctctcttgtcattccctcatttgtttgttcccatctcctgtggcaatagttctaaaccaagttcagaagtgaaaatctccctaagtcccaaagcgtcatgtcagtttgaacaaggttttgagctacatgtgactgaattttgggaaacctttaacctctaagagctcctctttggatttcccctggccctttcagcccctaggtgtcccagagtctcctgacaactgtaaggacaagaaggcccactgcccaagagaatagggactgggagcctcctctcactagcactgcagagccaaacttccctctctgagcctgcaccctccttctgccttcttagacctcctgaggcttgcatgcacgctgaagcctgatcctgaactggagatgtccctacaaaagtatgtgatggaaagcattttgaagcaggtattttcaaaattgaatttactggctttggggatgtcagggatctggacagctggaattttaagatttaagaaaaaaaaaacagcagctactagtaaatagtaaaatgttccattaaaataaaaagacttccttttttttttttttttttttttkgaracagagtctcactctgtcacccaggctgaagtgcagcagcatgatcttggctcactgcaacctcyrcctccygggttcaagcaattctcctgcctcagcctcccacatgcgccaccacacccagctaactttttgtatttttagtagagatggagcttcaccatgttggcctgactgrtctcaaattcctgacctcaagaaatctgcccgcctcaccctcccacagtgctgggattatgggcatgagccaccacactgagcctaaaaagacattctctatatgtaggtgactgtgaaattcattgttcaaatctcaatactttcaaagagatcattattcataattataatatgacaacaggcataaaataggactgcgttgccttatataattgcgcaaatgggagctgttgcaagcatataagaacatgcgggcaccctttctatatgccacatagcagaaagacttcaagtggatgaacattggtacactatttctccaagtcatttgcattagctcttaagttttgagatttaacaatgcaggtaattagaatactctgagctacctccaccctccaatattttctctttttattctcttaatcttggttctctcaaatttattattccatgtgaattataactatctcttatcactcaccatatgccagtcactctgctagttcatgtatttattctttacagtccttggtagatatttttatcctcattttatatgcatgagaaaactgagacccagagaacactacagcctttcctgaggttgtcaagtaaaagatatagctaggatttggaccctggtctatctgacttctacaatttttgcacaggctatccaccctcctaatatatgcctgctttaatacttagtcccatcaaaatgctgttgtgtcctggaggaaatctttgtaacaaaggcctgtccagtgggtagctgccttcatagagtgaattggagaggtatcagaatgcaccctgccaccttcagcccattgtaaaaacattacccctagtgcytgcattgcttgactcttcatggcttttgaagcttaaaaaagtcaccccattctcccscagccattctcaagagatataatacattatgcttctttaattgcaaccagttgaaaacaaggtctttagcaatggaatataagatggactctgtgagtcactgggaaaattccaggtaggaaaaatgtttacctggtgaagaggtacagctaagagggttgaaaataagaccaaagacaaccttttacaactttaccaaaaccagaccctgaacccaaagaagagaagtccttaaagataccgtagtcctcttttccaagccaaaactcagaatacatagtctgacagaagttttttatttatttgtgaatgattttatttgaaaaatcaaggccaggctcatgcctgtaatcccagcactttgggargcccagacaggtggatcacttgagcccaggagttcaagaccagcctggacaacatggcaaaaccycatctccacaaaaatacaaaaattagttgggtgtggtggcacgtgcctgtagccccagctactagggaggctgaggtgagaggatcacttgagcaaggagacggagcttgcagtgagccgagatggtgccactgcactccagccttggggacagagcaagaccctgtctctaaaaaaaaaaaaaagaaaagaaaaaaattagcacattggttaattagaaattattaaatctcttttataaaaagaataaaattacatgaaaccaggaccttctaggcaattaggaagcatggctgcattattccctataccaattccttctttaatctagaaaatgtgtttcacattgtcgttgaagaatctgacacttctgtgctatttcggggagaaagtgcagtgattttcccccattgatttgctatgtatttaattaacaaaattcagggatgatgattggcagggataatttgggaacactctcctttctttcttttttttttttttttgagacagagtctcattctgtcgcccaggctggagtgcagtggcgcratcttggctcactgcaagctycgcctcccgggttcaygccattctcctgcctcagcctcctgagtagctgggaywayaggcgcccgccaccacgcccggctacgtttttgtatttttagtagagacagggtttcaccgtgttagccaggatggtctygatctcctgacctcgtgatcttcccgcctcagcctcccaaagtgctgggattacagatgtgagccactgcgcccgacccaacactctcctttattttccctgtgcctgttgtgttggagagaagaggggaactaaatgaaatataccaccaccccagagaggcaggagagtgtggcagattaaatgttagatgagccaagcgtgatggctcacgcctgtaatcccagcactttgggaggccgaggtgggtggatcaccaggtcaggagttcaagaccagcctgaccaacatggtgaaaccytgtctctactaaaaatacaaaaattagccaggcgyggtggcacacacctgtaatcccagctactcrggaggctgagacaggagaatcrcttgaacccaggaggcggaggttgcagtgagcyragattgygccactgcactccarcctgggtgacagagcgagactctgtctcaaaaaataactaactaactaaataaataaataaatgttggatgaggagtctggagatttggattctagtttattgtgtccttatgtgaccttgggaaagctgtgttacttctccatacatcagttatctaatcggtaaaatggggataataatactgatttcattttgtttgaacgtagagtaggacagaatgtgaaaacattccagaagatacctaatgaaaatggaagtttgaattacatagcatgctattcttatccctaactataaaaataagagagccaaactcccagatggcatctgtggacctgcctggggcctggaggaactcatcaccctgaagggaaagacacaaacctggctggctttgccacctgctgattgtagagtgctagagccttgaacaaaaataggtggtagcctggtagtagtcacagtgggccttgggcaatatccagtgctgtgctagcttcaggtctgacccagtgcagtctcagtgatggtagccacaagggtgcttgtgtgaccccacccccagctccaagcagctcagcacagagaaatagagactccatttgtttgggagaaagtaagggaagagaacaaaagtctctgcttggtaatccagagaattcttctggatcttatttaagaccacaaaggtggtacctctataagtctgcaagaaccatagcattactgcacttgcggtgctctgtaatatagatatggcttagatcacaacacccaagtttttttgaatatatggaaagccttcccaaggagggcaggtacaaacagtcctaaatgtcaaagactacaataaatacctaactcttcaatgtccagacactgacgaacttccacaagtatcaagaccatccaggaaaacatgacctcaccaaaggaactaaataaggcaccagggtggagagacagagatatgtgacctttcagacaggtaattcaaaaaagcygtttgaggaaactcaaagaaattcaagataacacagagaaagaatttagaaactttcarccatgytaactaagaacagaagagaaaagacccaaataaataaaatcagaaatgaaagaggagacattacaactgataayacagaaattcaaaggatcattggtggctactatgagcaattatatgccaataaattggaaaatctagaagaaatgtataaactcctatacacatacatcctaccaatattggaccctgaagaaatctaaaacctgaacagataaataacaagtaacaagatctgggacccgaagtattcactgctgaattctaccaaagacttgaagaactaataccaaccrtactcaaactactctgaaacatagaagaggagggaatacttccaaactcattctacaaggccagtattaccctgataccaaaaccagacaaaagtacatcaaaaaaagaaagctacaggccagtatctctgatgaatattgatgtaaaaatcctcagcaaaatactagcaaactgggttcaacaacatattaaaaagatcatccatcatgatcaagtgggatttatcccagggatgcaagggtggttggacatatgcaaatcaaacactgtgatatgtcttatctacagaatgaaggacaaaaaccatattatcatttcagttgatgctgaaaaagcagttgataaaattcaacatcccttcatgataaaaattcccaaaaaactgtgtatagaaggaacatacctcaacataagaaaagccatatagaatagaccgaccactagtatcataatgaatagggagaaactaaaagcccttcctctaagatctagaacacaaggatgcccactttaccactgtttttcaacataatactggaagtcctatgtaatcagacaagagaaagaaagaaatggcatacaaattggaaaggaagaagtcaaattatccttgttttcagatgatcttattatatttggaaaaacctaaagactccaccaaaaaaccattagaactgatacacaaattcaacaaggtcacagtatacaaaatcatcatacaaaaatcagcatttctttttctttctttttytttttttttttttttgagacggagtctccctctttcgcccaggctggactgcagttgcgctgtctcggctcactgcacgctccgcctcccgggttcactctattctcctgcctcagcctcctgagtagctgggaccacaggcgcccgccaccacgccccgctaattttttgtgtttttaatagagacgaggtttcaccgtgttagccaggatkgtctcgatctcctgacctcgtgatccgcccgcctcggcctcccaaagtgctgggattacaggcgtgagccaccgcgcccggcccaaaaatcagcatttctatatgctaacagggaacaatctgaaaaagaaatcaagaaagtaatcctgttaacaatagctaaaaataaaataaagtacctagtaattaaccaaagaagtgaaagatctctaccgtgaaaactataaaatgttgacacaagaagttgaagaggccacaaaaaaaaaatgaaagatattccatgcttatagattggaagaatgttcatactacccaaagcaatctacagattcaatgcaatacctaacaaaataccaatgacattcttcacagaaatagaaaaaaaaaattctaaaatttacatggaaccacaaaagacccagagtagccaaagctatctgaagcaaaaagaataaatcaggaggaatcatattatctgacttcaaattataccacasctatagcaacccaaatagcatagtactggcatgaaaacagacacatagaccagtggaacagaatagagaaacaagaaataaaytcatacatctacagtgaactaatttttgacaaaagagccaagaatataaaggaaaagacaatcccttcaataaattgtgctgggaaaactggatatccatatgcagatgaatgaaactagactcctatctcttgctatatacaaaaatcaagtcaaaatggactttgagacatcaaaccatgaaactactacaagaaaacattggggagactctcaaggacattggagtgggcaaagatttcttgagtaataccccacaagcacaggcaaycaaagcaaaaatggacagatgggataacatcaagtgttttttttttttagaattattttatcagataaaaaattagtttcattgatgagtttttttaatcttttatttttatatttatttatttatttttattatacttttaagttctagggtacatgtgcacaatgtgcargtttgttacgttatgtatacatgtcccatgttggtatgctgcacccattaactcatcttttacattaggtatatctcctaatgctatccctcccccttccccccagcccacgacaggccctggtgtgtgatgttccccaccctgtgtcyaagtgttctcattgttcaattcccacctatgagtgagaacatgtggtgtttggttttctatmcttgtgatagtttgctcagaatgatggtttccaacttcatccatgtccctacaaaggacgtgaactcatcctttttatgggtgcataatattccactgtgtatacatgccacattttcttaatccagtctaccactgatggacatttgggttggttccaggtctttgctattgtgaatagtgccacaataaacatacatgtgcatgtgtctttatagcagcatgatttataatcctttgggtacatacccagtaatgggatggctgggtcaaatgrtatttctagttctagatccttgaggaatcgccacactgtcttccacaatggttgaactagtttacagtcccaccaacagtgtaaaagtgttcctatttctccacatcctctccagcacctgttgtttcctgactttttaatgattgccattctaactggtgtgagatggtatctcattgtggttytgatytgcatgtctctgatggccagtgatgatgaacattttttcatctgtctgttggctgcataaatgtcttcttttgagaagtgtctgttcatatcctttgcccactttttgatggggttgtttgatttttttcttgcaaatttgtttaagttctttgtagattctggatattagccctttgtcagatgggtagattgtaaaaattttctcccattctgtaggatgcctgttcactctgatgatttcttttgctgttcagaagctctttagtttaattggatcckgtttgtcaattttggtttttgttgccattgcttttggtgtttcagtcatgaagtccttgcccatgcctatgtactgaatggtattgcctaggtttcttctagggtttttatggttttaggtctaacatttaagtctttaatccatcttgaattaatttttgtataaggtggaaggaagggatccagtttcagctttctacatatggctagccagttttcccagcaccatttattaaatagggaatcctttccctatttcttgtctttttcaggtttgtcaaagatcagatggttgtagatgtgtggtattatttctgagggatctgttccattccattggtctatatttctgttttggtaccagtaccatgctgttttggttactgtagccttgtagtatagtttgaagtcaggtagcatgatgcctccagctttgytctttttgcttaggattatcttgacaatgcaggctcttttttggttccatatgaactttaaagtagatttttccaattctgtgaagaaagtcattggtagcttgatggggatggcatggaatctataaattaccttgagcagtatggccattttcatgatattgatttttcctatccatgagcatggaatgttcttccatttgtttgtgtcctcttttacttcgttgagcagtggtttgtagttctccttgaagaggtccttcacatccctatataagaagctgtaacagctctatagaaaaaaatctaataatctgattaaaaaatgggtaaaaggtctgaataaggccaggcgcagtggctcacagctgtaatcccagcactttgggaggccgaggtgggcaagtcacgagatcaggagttcaagaccagcctggccaacatggtgaaaccccgtctctactaaaaatacaaaaaattagctgggcgtagtggygggcgcctgtaatcccagctactcaggggctgaggcaacagaatcacttgaacccaggaggcggaggttgcagtgagatgagatgtgccactgcactccagcccaggtgacagagtgagactccgtctcaaaaaaaaaagatcgaaatagacatttctcaaaggaagacatacaaatggcaaacaagtatgtgaaaaatatgtgaaaaggtgcacaacatcaccaatcatcagataaatgaaaatcaaaactacaataagattatcatcttaccccagttaaaatgacttttatccaaaagacaggcaataacaaacgctggacaggatgtggaaaaaagggaatccttgtacactgttaatgagaaagtaaattagcacagccaccttggagaacagtttgaaagttcctcaaaaagctaaaaatagagctaccatacaatctagaaattctactcctagatacatactcaaaagaaaagaaatcaatatattgaagagatacctacactcccatgtttactgcagtgctattcacagtagtcaagacttggaagcagcttaagtgtccatcaacagagaaatggataaagaaaatgtggtacatatacacaacgaagtactattcagccataaaaaaaatgagatctgtcatttgcaacaacgtggatggaagtggaggtcattatattaagtgaaataaaccaggtatagaaagagaaaccacatgttctcacttatttgtgggagctaaaaattaaaactattgggctgggcatggtggctcatgcctgtaatcccagcactttgggaggccaaggcaggcagatcatgaggtcaggagttcgagaccagtctgactaacacagtgaaaccccgtctctactaaaaatacaaaaattagccaggcatggtggtgcatgcctgcaatcccagctactctggaagctgaggcaggagaatcgcttgaacccaggaggcagaggttgcartgagccgagatygcgccactgcaytccagcytgagcaacagagcgagactycgtctcaaaaaaaaaaaaaaaaaaaaattaaaatgattgaactcatgggggtagagmatataaggatggttaccaaaggctgggaagggtagtgggggatgaggaggaattgggggtggtcaatgagtacaaaaaaagagaaagaatgagaaagacctagtatttgctagtacaacagggtaactatagtaaaaaataatttaatcattgatatggtttggatttgtatcccctcccaaatctcatgttgaattataatccccaatgttggtggaggggactggtaggaggtgattggatcataggggtggattatacccttgctgttctcgtgatagtgaatgagttctcatgggatctgattgtttaaaagtgtgtagcactccccctgctctcctctggccatataagaagtgcctgcttctccttcgtcttctgccatattataagtttgagtcctccccagccatgcttcctgtacagcccatggaactgtgagtcaattaaacctcttttccttgtaaattacccagtatcaggtagttctttataacagtgggagaacggactaatacaaccatacattttaaaaataactaaaagagtataattggattgtttgtaacacaaaggawaaatgcttgaggggatgaataatccatttaccctgatgtgattattacgcattgcatgcctgtatcaaaatatctcatgtaacacaaaaatatatacatctactatagacctacaaaaattaaaaaattttaaatttttttaaaaataggagagccaaaaagaacagtagttatttcccttattgcaatggctcatattggcatgaggaagccagcagttggggtaatggagtggttgctggccaaaaattagcacatgcataagtccccactggaagagagggattttgattatatttccatctgctccacttcaggcatgctggctctgtcatgttgtacctcacccattctgaggtagacattccctagatgatttygggtatgaggtgggggcggtgttgggggagggatccactgccaaggacacctacagaaagctgctctctactttgcagattgataacaaacagcttcagggctatttatctgagcttcgcccagtgacgattgtgtttgtgaacctgatgtttgaagaccaagacaaagcagaagagataggcccagccatccaggatgcctatatgcacatcacttctgtcctgaagatcttccaaggccaaatcaataaagtcttcatgtttgacaaggtaagtgtgaactatgggatgggaacctaccaatagttttaggttagcattcatggacaagcacattggtgagaatagacacaggaaatttaacctagaggctgggcgtggtggctcacgcctgtaatcccagctctttgggaggcagaggtgggcggatcacttgaggtcaggagttcaagaccagactggccaacatagtgaaaccctgtctctactaaaaatgcaaaaattagctgggtgcggtggcacgtgcctgtaatctcagctactcaggaggctgaggcaggacaawggcttgaacctgagaggcggaggttgcagtgagcygagatcgcaccactgcgctccagcctgggctatagcgtgagactcygtctcaactaaacaaaaaaagaaatttaacctagaaggccagtctttgtttataattataacttctatggtggatatggcacttactatgtgccaggcactgttctcaggacctgatctctattgactcatttcatcctcatgaccactctgagcagtaggttgctcttgtcattatcctcattatatagatgaggatgctgaaacacagattaggataccaggacaaggcgagattacgttttgcttatgatcatcaagctagtaagggggaggctgggattcaaacccaggcagtctgccatccccgtctgagctcactatgctgggctacctctcactacgctgggctacctctcactacacataagtctccagctcagtgcatgatgtattacccaggggtttcaggtcaggagtctttagtaaccatcttaccccagaagcttgtttccaagaaagcccacttgccatgtcaacacctccagttccccttttattttcatccatggcagggaggggactgcctctggctcccaggtgttttcgctctgttcttttttttttttttttttttgagayggaatcttgctctattgcccaggctggaatgcagtggcatgatctcggctcactgaaacctccgcctcccgggttcaagcgattctcttgactcagcctcctgagtagctgggattacaggcamgcrccamcacayykggctaatttttgtatttttagtagagatgaggtttcgccatgttggccaggtgggtctcgaattcctgacctcaagtgatcckcctgcctcrryctcccaaagtgctgggattrcaggcrtgagccactgcacctggtcttcactctgttcttaatcaattcagagaaaagtgatgtgatgaacaaatgaccacagatgcatatgtgagaattgatttcccatctcaattccttttgtgtattaaaagcagagcacttaattactgccccacatccactcactcactaattcaacaagcatttactgagcatttcatagaagacgaaaagctagggctgggcagcagagatgagtaacacatatattgacacaaccaggcaggaagcatgcattctatatgagacgaactaactctgtgctatgggagttctggaaagggattacttccagcctggtgtctccagtaccttcttcaatactgacccatgggtatcataagaaaagagtgtagaatctaagagaacagtctttcgtgtcttgcagacatggctccaaagattcccagctgtgagacttagcaagtcattgaacttctctgagccttggtttattcctctttgaatggggatagtatttgtctcaaatgattgtggaaagttttaaataatgtaatatgtgtgaggcacttggtgtaatgcctatcttagagtcagtgtgcaataaatgagagctgtcattccattgctagggggaatcaaaagctcttgccaggccgctacataaatttgcaggcaaaagctccctgcttcccccaaaggggttgccctctttgcacgtacctagaagcagtgtttcccccttcatgtcaaggcagatcccagtcctttttaagatctaacagttgatcaaattcttttggagagggttgaagaaattgaggtattttagtgttctttgcattttatcaggatgtaacatgtcaaaaactcaaaatttcaacccatcaccctttattcacaatgcccttttcttacagacaacagcacctgactgaggtcattttttaagtgactaatactacaaatgccaagttttagagttgaatcattgcatggaacagttagctttatgataagaaaacctacttacagcctaagcctttatccctaagaataacagtatctgcaaagtactttatagtttaggatgactttttgaatatatataacacattaattcttttagtagccaaaaacatctcagcaggtctacagtatatccattttcagagagataaacggaagttcctagattgtaatagacttatctaagtttccacacttgagaagtggcttgaggacagagactttctgattccagagctggtgccttttccactgctctgtgctgctgcttcatagacttaaactgagcactttgcagcatggaccttggccacaggagagagtaggccgaagcatgcacacagatagctcagccctattcactatatctggagcaaaacaagcccttctcaaggctcaagccctcctgttgatgatgcagtagaagtgtttgaagtgtactaaaaataaaatactgtgagagaaatcatgataaaatctgattcagaagccaaaaattgccgccggctctctgttgagccttctggccagtccagtttaaagcacactgtccatcagctgtggttgctgtctctytccctcacagggctgctctttcctctgtgtctttggcttccctggggaaaaggtacctgacgagctcactcatgctctggaatgtgctatggatatatttgacttctgctctcaagtccacaaaatccagtgagtattgaccctggtcccacccagyggtccctgacccttttgaggcataagtagggagggcatgcagsgaacaggaaagaaagaagaattaattaagaacttagtcctgtgtctcaaactgttgttcctccttcgcatctccgggccatgtagaaatgccataaactaattccaacgggtagagaaaatcctttcccaccctttcccaacccagacattatttcccacccttcccactttctctacgctcattatctttatttctttccccacaaatcttgtctcccctgcaccagaactgtatccatcggygttgccagtgggattgtcttctgtgggatcgttggacacactgtgagacacgagtacacaggtgtgctgggtcagctcatctccagntttctttcngcaaacacagcaccttgccactgggctttgcgggaggaagcacaaaaatgagtgagacatgagccctgccctcagaaactttagagtcttccagatggagccaagccatggagccctcaatgcttgcagagtgtgcatttctggggctatgtatgagtagagaaatatgtagtcatgagaggggagcagtgggaggctatatgttgatggaatgaggggctcctgtaatactttcctgttaacattaaatagttacttctcttaattcctggaataagctagaactccttaaaaattatgaatgttgatattactgaaaaataatgacactctcaaaagagagtagtaataagtaaatcttatctccagatttcacaactctattacttcccttttccatcctatcagggtttaagattttcagcaataatgcatctaaaatactgaatatatgtaaaataccacgatagttatgtctraaatgatacaatgtctgagatgttcttcraaagtacacagggtggggagtgtatgggggtgaggatggggcaggattagccatgggctaatggcttgttgggatggggtgatgggtatatggaaattcattatattttattttatggtcaaatttctccacaataaayagttttcaaaaagagtamcttgttcagaagtattcamgtttatgttaaagtgacacatttgctacctcatttgtagtaatattaattgaaggcttacaagcagccagctgctgttgaaagtgataaacgtgtattaactmattaatcttcataaaccaccctctcagagagttactattatcatccctattttataggttagagaatggaggcatgaggagttatttaaagtaattgtcccaagtagtttgcacatagttaggggtagagctggtgttcaaccctgcacagtctgccttcagagcctgtgcttcaatcctccatgcacgcctcttctagcccatttactaaatcgagaaatcgccaaatgaaggtttattcataggagcatgcagacacaattttatgtctcatatggagatcagtaccccaggcccaarcwtgtgcttgtccaccttgtggcagaagaccaactgacaccttctctgagagccttcagtgctgtggccatcccacttacagagcctgctccatactcaagccccttccatccctgagcaggtcattctcttgacctcccaagtgaggcagaaactttgctaatggctaactaactccctgcacattttgtgaatagccattggctgaatatgggtcttgagactaggcttctktgtcactcatgarcagcaaagggagtaaagggtaaaaatgcyatttggggacaatgtttcagattacattcagttcaatgcctgttatttccctgatctttgactttctctttcttgctatagtcattggtcaaaaagtcaacttagctgccaggatgatgatgtactacccaggaattgtgacctgcgactctgtcacctacaatgggagcaacctaccagcgtacttttttaaagagcttccaaagaaagttatgaaaggtgttgcagattctggaccattgtatcagtattggggccgtactgagaaagtgtgagtgtggagcattaattttgaagtatattttartaaagaagcgggagaattatgatagcaaagcagtcacycatttaagatttggagccagttcaaraagttgaaatctatgctttccccagaccaaggcccagacttcaaaatccttaatctttcctccrtctgactgacactatggcatggtggaaaatcccattctctcctcagatctgagaatatgagggtaattcttcaaaggttgtacaaaccaaacaaaaaatcctctcatttgagtatctatttgcacccaaatgggcccaatcaccaaccatttaatattatttactaattawgtcaactgtatgccgaggcattgttagggttaaaagagtataagatattatttctcctctaagtctttagtgaaatacattccccaaaagctcagcatagatttatgggtgtcactttgaagcttaaaatccttcaatggctttcagtcattttcatggtgatgttcaaaatctttgcagtgacatacaaggtaccacctgcctttccaacctcatctcctcctgttccccctcctctgggttgtttaagtagattgtcctcatcagcacccacctaatmctggtctattgggaaaaccgcagtcaatttttgaaacccagctcgagggattcatagacattcctctatgaattccccatcccagctagacagttaagctctttccccctttgtcttccttcttcctcttccttttttcctcctatagcatatgcttctattagaacactccttgccctatatcacaattattcacttcctacagttttcacttgytacactgtgaactctttgaagatactaattatttctttattcttatatccccagtgcttggtatacagtaggtcctcaataatgatgaataaatgaatggcacagagagcagaaagttgttattcattagattagcaagctggaatcgaggtcttcaagagtcagataacagaaccagggctgcagttgggtcaaggtgtctttattattcccttcagtattccygaggcttagcactgtgcttggcatacataggccatcaataaagtgcagtttgaatacatgaatgaataataatttttagtgagtacttattaaacatcaggtactttacctcaaaatatataatccagtcttaatattgaccatacgagatagaaactattataatttccattttataaattcaaaaactgaggctcagagatgttaaatgacttgtctatggccatatctatagtgagcaatggagtcaagattcagtcacaataatgtgaccttacgggcaatcacaaaacttcagtggtrtgcaaaaataaacatttatttttctcacaaatgtggggttcaattgatcttggctggatttggttgatcttgtcttggcttattcacgtgcctggggttcaacagactgttggccaacctggcggcctcagttgggataactagggcaatctggctctatgtgtctcatcttccatccagcatgtttgtcctggcaatactggaggagcaagagagcaggcccaatgcaaaagcatttttcaagcctcttcctatgtcttatgtttgcagatagtccattgacraaagcattcacaaggctgagtccagaatgagaggactctgccaagttacacagcaaagggcacagatacaggtactggggccattaatgcaatcagtttactatgcaaacccaggactatctgatcccaaagcctgtactcttcatgatttttctgtaccacctctgcagataaragtggagaaatacacacacagtatgaacagggcctagttcctgcccagaaaactcacaatcaagtggggaagaccaacatacacaaacttagctgtatgttacatgggaacctttgatatatgctataagagaggcataacaaagtagtattgtagttcagagaagggcataatccattttgactaaaaggcttcttcaagagatagtgttatggagtgagcaaacatatgcaccctggcctatgtttggatactgtcagtatcctgtgttaccacctgctatggggtcttgggcaattaaactctttgtgcctgaatttcctcactggcaaaatgaacataagagtagtacttttttttttttttttttgagatggagctttgcttttgttgcccaggatggaatgcaatggcgtgatcttggctcactgcaacctctrtctctygggttcaagcgattctcctgcctcagcctccagagtagctgggatggcaggcgcamgccaccacgcccagctaatttttgtatttttagtagagacaggttttcaccatgttggtcaggctggtctcraactyctgacctcagatgatccamctgcytcggcctcccaaaatgctggrawtacaagcatgagccacygtgcctggccagtagtccttttttttctttttgagatggagtctggctctgctgcccacgctggagtgcagtggtgcgatctcggctcactgcaagctccccctcccgggttcacaccattctcctgcctcagccccctgagtagctgggactacaggcaaccgccaccatgcctggctaatttctttttgtatttttggtagagayggggtttcaccgtgttagccaggatggtctcgatctsctgacctcgtgatctgcycacctyggcctcccaaagggctgggattacaggcgtgagtcactgcgcccagccaagtagtactwcttaacagtgtttttgtcaggattaaagaaaatgatgcatgtaaagcacttggaactgcgccagacacatagcatgtgctccaataaaaggcgcgctattattgtttgagcaattggtggaatctttgcaggatgtgtgactctgcaccacattgaaatctactgggtcgtatatcaggtgtctgatctccccagaaaggggtttctctaccagtgcagactcaacaagcatttattgaacaatgtgccagatgctatggaaacagatgctacctgagttctttggattctccactaccaagtcagaccttctcstttctccttcttttggcgtttgcgacccktgagtcaggggatagactcttgttagcaattgagaaggaaactttctgggaactaagaactaatcactcttgctctcaatatgtccctgttttgaatctagcatctgttcttttgttcttctcttcagcatgtttggtatggcgtgcctcatctgcaacagaaaggaggattaccctttgctgggtaggtagtaggccttgattttaaacttctttattgaactaaaacaaaacatgcagaaaagtacatcaatgataactgtgcagcttaatgaattatcacaaaatgaaaatataatcatcatccaggttaagaaatagaaaaatagcaatacaccaggattactctttccttcttcctttccccaaagtcttctaacaccctcgattacttatgcctgtttaaaaaattgatacagatggaatcatacattgtataattatatacrgcttatatatactttctcttactcaatggtatgttatataattcatccatattgttgggtgtagctgtaatttattctatgtcattactatgtagtattccatttttataaatatacaacaatttacccattctgttgctgtgcaacatttgggttatttccagtttttggttcttatgaataatattgccataaacattcttacacaagtcttttggtgaatgcatgtatgcatttctgttgagtacaaggtaggagtaaaacgtaggactgaaattgttgggacaaagggtgcaatttggtcgattatgccaaatagttttccaaaatggttgtatttatttatattctgactgagaatgttaagagagttccagttgttcttcatctttggcaacaacttagttttatcaatctttatcctttcaataattctgttgggtgtatagtggtatcttattatggtttccatttgtatttccctgatgtggttgagctccttcttcataagtttattggccatttggatttatttatttatttatttattttgagacasagtctcactctgttgcccaggctggagtacaaaggagcaatcttggctcactacaacctctacctcctgggttcaagtgattctcaggactcagcctcctgagtagctgggattacaggtgtrcrccaccatgcccagctaatttttatattttagtggaggcagggtttcaccatgttggccagactggtcttgawctcctaacttcaagtgatccacttgccccagcctcccaaagtgctgggattacaggcrtgagccactgtgcccagcccagacatttttttaaagtacctgtacaatttttcacctatttttcaactgggttatattttgattatcttttggaattatttacacattctagagatgggtcctttgtcatttgtttctactgtatatcacttttcccactctgtgtttgcctttttactctcaattatgcatttaataaacagaattcttaactttaatgtaatcaaatttacctgtcttttatagttagtgcttctgtatactatttgagatacctttccttacccaaaaatcatggagatatttttctagcatttttttcagaaattttgtttttaccttttatatttaagtctacaatccatttggaattgatatttttgtgattcctggtgatagggaccttattgtaagaaagataactcgagattagacaggggagtagacctaaaatgaggaagggatatacctataagagaagagacccaaagaagattgacctgtggattctgaaggcagccacttctagtagcacttgtaatttccttctgtcagacacgaacatccccaaaagtcttatcataagttaaatcttggtnctaactgtgtcaaggcaattaagaggaggctctgtctcacactttggagaaatatngggccacaatcttggtgtcagcagagcctgaaggagggcaacagttccagaactgcaaaaaaacacttgggccagcagaaatgcctcactttcactgctttcaggtagttttcagggtcttcaagccaatcacttcatttaagtccagattccaaaactcctgaagctagagagaaggaatacccactctcaccctcctcagaggccttacttttcatcctaggatatacttattttactaactgacagcaacagaatcctaaccttctttctacaagattgcagacccaacatgacagtcacattagaacacattatrtggatatttcttttttttttcttttgagacagagtctcactctgtcdcccaggctggagtgcagtggcgcgatctcagctcactacaacctctgcgtcccgggttcaagcgattcttctgcctcagcttyccaagtagctgggattacaggtgcacaccaccacacccagytaatttttgtatttttmgtaradacrgggtttyaccatattggccaggctggtctygaactcctgatctcgtgatctgcccgccttggcctcccaaagtgctgggattacagacgtgagccactgcgtgcagcctatgtgtatatttctcagtctgatctagttgcccttttgcactgattccaccagtatgacataaagatcaggtccacatacctttccttcaagctataaccaaacacagattgtcagaggctagcagcatgggaaatgcccttcttttacaagggctgctataaatgaaattgcaacagcatggttgacaacaaaactataataaataaatagtggctttttagggtaaaaactgcatacaacagtccccgatattgaggctttgcttagatagaaacaaggtgcatgcatttcaagttaaggagacaatctcattttagaatccagctaaagatactccataaggttctaccrgtaggtgttctgtatgaatagaacacagggagctggaagagtcagctatgcaggcttttttttttttttaagcttccttaggaaactttattttttttgagatggagtttwgcyctygttgcccaggctggagtgcaatggcgccatctcggcttactgtaacctccgcctcccaggttcmagcaattctcctgcctcagcctccygagtagctgggattmyargcatgcascaccacgcccggctaawtttgtatttttartagagacggggtttctccatgttgaggctggtctcgaactcctgacctcaggkgayccaccygcctcggcctcccaaagtgctgggattacaggcgtgagccaccgctcccagcctggaaactttattattttttatttatttattttttattattatactttaagttctagggtacacaatgcacaacgtgcaggtttgttacatatgtatacatgtgccatgttggtgtgcagctatgcagcctttgaagcctcatcttctaagttcctatgtgagcttcattcaggccaaagaaaaacacaaaacatctcaygaaattgaggttcaaatgcattttcagaaagggaatatttcacccaaaagaagcaatacagtctgctaagtagttctcactaagccatactcagaaatgtatattaccaagcaaagcacttagcttctttttattaaatgtctacacttgaattaatggtccttcaacaaagacattagataatacctggatatttatttgttctatcagtgaataacaaaatgggcctccacattcatctgcccagcacagaaggaatagttagctctcaatgagtctccaacttttttgacagaaattgctcactgcttagaaattacaattcttacagctccttacagcagggtttcagatttcacccagggctgttacagtatttaaaaacacacaagaaaaataagggttgtaacccaaggtgatttttatttttttcttttccaagttttccatattttctacagcaagcatatgttagttttataatcagaaaaaacctataatctattttcactaagaatttaagttgctcttatgatagaaataatctgtacatgatttctgaaggcaaattgaattttatccctggtaatgctttttgtagccctgaattaagtataatcttcatttacagagggcaaatttcctttatcacagaatcagaaataaaaatattttatccataattgtttaatgtaggaaaactaactttaataaatttatttcctaatgtaatagtctacatattacttctagtgtgttgaataaaaacaaaaaacaaaaaacaaaaaaaaacaagctttagggttagatagccttggcttaattcctggttgtgtaatctaagcaaatctcagttttctacactataattaaacattataatgaggattataagaatactttctctcacagcttctaatcaaatgaaactgcaaaaccacatggttagctaaaaagctcccaggaagatttaaacaattttgaaagtgcataaggcttgaagaaagtctgtgaacaatgccatggaaattccaagtttttttttttttttttagatggagttttgcttgtcgcccaggctggagtgcaatggcaggatcccggctcgctgcaacctccgcctcctgggttcaagcaattctcttacctcagcctcctgagtagctgggactacaggcayccgccaccaagtctggctaatttttttttttttttttttttgtattttcagtagaggcagggtttcatcatgttggccaggctggtcacgaactcctgacctcagcagatccgcccacctcggcctcccaaagtgctgggattacaggagtgagccacagcgcctggcccaaggatatttttagaaggagggtttctatgtgactttttatatctctagactattttacgttgattgagtttgctcttttttaaaactaaaaataacaggacgtaataaagagatcaactacttcatgtatactatgaagaaatttttgatatctaacagcagccaagtyttaatgtatgagggattaccaggatatggaaaaagccagatacttatgaaaattgagtacctggcccaaggtaagaatcacaggtgagtgtcttggaatgattgttctgtgtgaacccatagaatcctgatttattttgatgctcctctccttcctayaacttgccttatgtaaattatctataacctacaattattggatgccatgacccttgtgctaaatagataactaacaataaacacatagagctaagaaaaagagaaactgggctgacccatggatatcctgatttaatgccaggaagggcttggttatttaaagtttcctaagtaatcccaatattcagacagatcgagaacaattggcakagatgttgagatcaaggctagatttggtctgcagaacaaacacttaagtttatccagctagctgacagtgtagcaggaccagctgcagacaaaacccctcagacaccgagatagtgaagggagtggctttaatcagctgggagaatcggcaggctagcgtctcaaaatccgagctcgtcaaggtgctcaacttctgcccttttaagggctcacaactctaagggggtcygcatgagagggtcgtgatcgattgagtaagccagggggtacgtgacaggggctgtgagcactggtggtcacagtgaaacagaacagaacragagatttcacaatgtccttccatacaatgtgtggaatctatagataacaacagttgctaggtcaggggtcgaattttaactaccrrgcttaggtcargcaggcccaggcctggtttcgggtctggttcttaggcgccgggctacctgcctttagtttcgcttctctgtccttttctgagtataaaacaatataaaacaatatgagagggtctctstcttccctcatttcccccgtttgagactctcactttttattagtgggagttctcactcttatttttgccacttatgccttcttgtgcaatagattgatagtgattcatatagtacacttgtgttgaggcattttggtgaactaaggtagcaatgaagctttttatcatttgaagaagtacaggcagcaagcaagggagcagtaagcaggtttctattactattataactcctatataagagttttaaatcctcctagtgctgggaaccaccttctaaacatggcttcagggtcgaatccgtgctacactcgtacgggcatatgtgccagttttgtcatgtttttaactatgtctttaactacgtctttaactacttgcctttgattatctatgtgtagacagtaattagtaaggttaaatttttatagacctctctttcagctgctagaagtagtcgagagccaatctattttgatagatagcatttcttatctgagtttcttgccgggccagaatagtcaaggcttgactggttttattagtgatgatttctaaaacagcttgcaaccgtatgattcagttgagcatgtaaatgggggtctggtatacccatgagccatcttgtgtctaagtggcaggcctatagtattgtataattttttaggtggtcattcatcatctttttaattatctatggctaygtttcgcttttcgcggaaagcatagacagggaagcccaggagttcgcctatttgtatgggcagtaggaagaaagatggtttaatagtgccaataacacaactacctgtccactggtcaggcagcttagcgtaggttctatgtccacgtatccagtatagcctagtggggggctgtctagtccyggtggaattctgggtgggcttaaacggtctgcaactytggaaatttactgaatggatttttatctgygtggtttgaactccaccatgtaactgtttttgtggtaccattatacagtttttgtcctaggcaactaagtcatcctacaggatgagtgaattctttccttttttcagctatgcaatattgtctaataattgagacttttagaacctagaaatgatcagggtgattcttttgggccgggaatycatcaggaactgggtctgtaggcactaattctcgggcttcttatgccattgatctcttattacagtttctccacaaaygtaacatgaggtgacatttagagactgggctrcatgctcggctaattgcamaaacaaatttctggtttttcctggagtctctggtactggcacatttagttaatcatagaaagtctgaaatactggttccggagagagtttacgaacctcctcttttactaaggtatttactctaggakctagtccttttttatcgacgcccagagatacgtgtacttctttttttctaccttgggtttaagggatttgtaattactaatttcaaggggttgcagcttccactcgtacaggaggggctgccttctcctttttggagctaaacagggtctttttcatcctttttctaagtagcctagatgacacaagaccagtaattacacacatttgcacatgagcttaattcgtggcagatatacttatttcctgctgtgtaacttttttttttttcagtttaaagaaccgcatcttattctatgccgattgctattgatagtggcacaagcattaaattttagtgttacatgcttggggatccctctttcttctgtcttagctattactttacttgtgtcacctagaaaaggaccagtccttaatttattttaaaaaactgtgatcattggaggcttaaaatgggtcataacacasatcaggttggttatttcctaggctacataccttggatagaatagcattatacaaacaagtttcttttagagtcctcgtacacttataataaccatgaaataataggactgtagcaatcttttgtcctacctcagtgacttgatgtatatactgggaacagttctcagtctgaggaaggtcagttgaagtccttactgtacaagtccaaattttaaggaaaatgagtcccgtgatgagttttctcatgcttcggccgtgcgtggaccagtcagcttccgggtgtgactggagcagggctttttctgagtcactttgcagaggttggtgaagctgctcccatccacgtacagctcccagtttactgatgtttaaggatggtttyggaggttgggcccactagaataaactgagtccaacacttctacacagttatgtttaactgggctctctgataccaggagcaaggtggcggggtttagggtgttgcaaacttcaatggttatgtggggattttcacagagcaagctttggtatctagtyagtctagcattcattagctaatgatgtcctttggtactgattaaagtcaccacagcatgggggggactttatgtttaggttttgcctaagagttagcttatctgcttcttgtgctaacagggccgttgctgccagggcccttagatatgggggccagcctttggaaaccccatctarttgttttgagagataggccactggccttggccagagccctacagtctgggttaaaactccaactgccattttttttttttgaagataaccattcttttttttttttttttaagtgaactttctttatatctgtrgactagactgtctaaggccacaagattagaagttactataatacatgttacactgttaacttttagcaaactttacttttgttgaaaaccttgtaagtttgggatttcaattatcctttgctatgagtaagaccttgtttagtctraattaacttagaattggtatagatggccctttttttttttttttttttttggcacatagagtgtgcactttcgtcaggtcaggtagccccagggctgggsscgacctgagtttttctttcaactcatgaaaagcttgttgctgttgtttgtaatagatataatttatctaatttacatttttattaacatcactcactaaaatattgacttaaattttgtagctatttgatttcaagctttaaattgatctggtattcctcgtgggactccaattgcgtctaaatggacgtgagagtygaaagacctataagggggcttctctcgctttacgatgtcttatttttcctccctcttgttgaygaaatgccagggtgaaagggatagccaactggactaaagtataagtgccactccagttattcggcagagtgcccrgtaaaggtccaccacaataccaccacacatccgcttggggatgaacaagggctgactgaktgataagctcttgaaaattcttaagctcattgcatcmcttcaggtctccaaggaatcctaagtttcctctctgtggtgagagacatgaagtgaacttagtgttgggagacggaggctggatggccctcgggggctgacccacagggatagcagagagagtttggcatgacttattactccaggctgtagaatcctggaaaagagctaccatgcagcccacgcctggtggactggaggaccactttagtggaagggggacaatgagggcctctggcctgccatgtgcacaagcawaacaactgcttttgtttaatgtgcagatggaatatttgatccatttcaaccaggcatttgcatcttggtatgctgtcttaattgccaaagtttgttttaagtctttaacttctatgatcctctagtaaaatgaatgtttcctttaggacctatttttattagtttttagaccaaagaaagctaaacaccattttatatttaataatacttcttgtatgatttttataccagataagctaaattttacctttatattagtgtgttattaatgttaaacttaattttaataaaacctcatagacatatttatccaatttttcatgtttgaccataaggtaagtttttacagactctttttaaccttttataatttttgttaaagagcaggttggtgcttcaagaaaaacctgttgcatttttactttaatgtccagttcacagaaaaactggatgatacctttttatctttagctaattagtttacacacagaatttttttttacaattaacattttaaaacttgcttaaactttcaaaacaataatttttttaaccttttaatgtaggtaaaaatccacattcttatgcctccttctaatctttttaccaaaagtatattttacttttcttatgcaccttgcacataaactgtttcttcaatagtactcaggaggccttattactttcaaattatacaatattttttgcataaattttttataacatcgttttctatgactttcgcagataattctttgacatgtctcaactttctgacttattacaaatatttctttctttaaacaacagttaatttatttcaagacaagaatttaccatataacactctttttacataaattttgccttcccacagctctttttttttttttttcctgttagcaaagcagctgctgctacagattgaatgcatctgggccatccgtgggttactgggttaaggatttttgataggaaggcctcagtgctttcgggatacgcccttrtttacactaacaacaaagtggtattagagtgttacagggttacggagaatacctttaattatcaattttaggttttaaatttaccttggcttttaaagggaatagggtacactatttttttcttaactacttggatatttctctctatttttctttctctctttgactttctgkctctctctctccctctctctctctttgactttccttttgcctctgtttcttcctctctttctgcctctcttaactactgtgggggcgaagggggtctaaaaccagctgtaattgtctacgtacagaaactggtctgtgtgccttggcttacaggttaccttgtgccatacatttgaaacaagggacctgtctaggcytccttctgatggccaacccacctctaatgttggccagtctattttacacaaagttctaagtttttctagtgtcatagtaacaccgtaatctcccttaaatcctttcttgaaatttttcaacatagtttctagtagggtgggcttatttgtgcctgacccatgtttcttcgagacaaaacaccactctcacaccacatgcacaccacaaaacaaagaacgggtaaaaagggcacgcacacacttttgcagtttacactaaaccaaaatcaaaaccaaaatcagagtattcagaaatccaagccaggtcaaaaccaaaaccaaagtatyaagcaatctaagtcaagtcaaaaacaaaaaccaaagtgccggaacaggcacaccgtgggtgatcagatcaggccatgcttccactcaaatggagtgggaatggagtgggcaagttcccaagaccagtcctgtcaagtaattcaaaccaagtcaaaaccaaaaccaagtgctgataaaggcacgccgtgggtgatcaggccatgcttccactcaaatggagtgggcaagttccaaagactagtcttaccaagttttagttgtccrgactccaagtgccaattccttcccggtgttcagccactctgttgatcctccacgggggcctgccacacactgctctggcgaggygtcccaccggggcaaatgcctacccaggagagctctcaggatccgcgtcactctggctggttggagtccccagcagggatgttccacagggcaggctaaagccgcctaaggagctgcctcgaccatctgttaatcaccttgcttcccggtcagggaaccaagaaatgtagcaggatgagccgcagacaaaacccctcagacaccgagatagtgaagggagtggctttaatcagctgggagaatcggcaggctagcgtctcaaaatccgagctcgtctgatgctcaacttctgtcccttttaagggctcacaactctaagggggtccgcatgagagggtcgtgatcgattgagtaagccagrgggtacgtgacaggggctgtgagcaccggtggtcacagtgaaacagaacagaacragagatttcacaatgtccttccatacaatgcccttccatacaatgtctggaatctatagataacaacagttgctaggtcaggggtcgaattttaactaccgrgcttaggtcaggcaggcccaggcctggtttcgggtctggttcctaggcgccgggctatctgcctttaatttcacttttctttccttttctgagtataaaacaatatgagagggtctgtctcttccctcaacagggaatcactagttcaaaccatttagtcctaagactggagatagagaataagaggtctttggatttttccctggaagacagatctaatatacttgtctcatgttgtttatttattttcatataaggaatattatgagggctatctttgggacaatccattctacttcctcatggaagtagatagtatggtattcaataacagtggtgatgaccaggacaataatgatggtgactcatatcccttccccacctaacctaaacagtgtgaggggaaaatgcttgttaatcttataatattcttagctgtatctctatcccacattaaagttaggcctgagaaaggccagttttaaaatatctttatcattgctgaagggataattcacaacagtcagaagacatttgtttattcatgtattcaatcattaattgaattcctactatgttcaggaactactaagtgctgtattcactagccggggcctctgtaaaaaagtactacaaatggatggcttacaacagaaatttgtctcatagttctcaggggtaggagtctgagatcaaggcatcttttcttctctggaccatgaggaagaatctgtttcatgcccacctgctagcttctggtggttgctggccatctttggtgttccaaagatggcttgtagaagcgtcaccctaatctctgccttcatgtcacatggcattctccctgtgtgttgtttgtgtccaaatttctcctttttataagggcatcagttwtattggattagaggcctaccctactctagcatgatctcatcttaactaattgtatctgcaacgactctcttttcaaataaggtcacactttgaggccctagaggctaagaatttaacatatgaattgtggggacatgtgtcaacaagtgccaaagccctgaatatcaataaagtctgctctctgccctcaaggagctctcacagaagaggaggagagagataatgtgttagtcgttttcacgctgctataaagaactacctgagactgggtaatttataaagaaaagaggtttcattgactcacagttccacatggctrgggaggcctcaggaaaattataatcatgacagaaggcaaaggggaagcaaggcrygtcttacatggtggcaggagagagcgagcaagggaggaagtgccaaacttttaaaccatcaaatctcatgagaactccctcactatcatgagaacagcatggggggaaccgccctcatgatccaatcacttcccaacaggtctctcccctgacactcgggggttgcaatacgggatgagatttgggtgaggacacagagccaaaccatatcagatagcattaaaagttgaatatagtgagggcaacgatagagtcatgcaatagagaattgtggaagttcagagaagaaagggtatgtagtcaaccttaggacattgatgacagtttccaggaggctacacctgagctgagacttgagatgaacctcaaatgaggggcaatgagaagccatagcactctgggctgaggagacagcataagcaaaggcatggagaggagaaatagctctgggtgtgcagggaactctcacctgcttgctgttggtgaagggtagattgctaggcagagagtggcaagaaaggatagaatgaggctttggaaagtcttgtgtgtcacataaaggaggcctgggttcatgccgttaggcaatgggagctcccagtcagagggtcatgacctggatgggggtagtggcttgctattgtggtagtatagggtggcagtaggactagaaaggagagaattagctaggttaaattaatcagggcttaggaacaggagamragggagtatatcagaagcagcaataaagaaccattgcgagatagcttggaaaatctccatcattatagctgaatatgagaagacagagctttccttcaacctctattattttcaaaaatatatatttaaaaactctcttctgtttcttgattttctcacaaacaggattattgccatttcattgaataagatcagcttccatcaaactttctataccatccagatgttcatggccaatgtcctaggcctagacacttgtaaacattataaagaacgacagaccaaccttcgaaataaagtcatgacactgttggatgaaaagttctactgtcttcttaatgacattttccatgttcaggtaactagctagtattatacttctgcacaaatagccatgggcaggcacagcaactcctctctggtgcattgtgacttagcatctctttggtctgtatatctgsagtatccagatggtgagtaaatggctcccaatcctctctggatgtgcatcaacattcttgacatattagaggtatcttgaaatatcatactcaagaaaatccaaatggccatctgctgactaatttttttcttacctttctatcatagctatactagctactctgggacacaaagtcactctgttcctacaagtgatgccagtgcagactgtgccctgtcttttcctgaattatctaacacaggggtcctcaacccctggtactagttcatggcctgttagaaaccagaccacacagcaggaggcaaccagtgggtgagcaagtgaagcttcatctctatttatagccactccccattgctcacattaccacctaagctcctcctcttgtcagatcagcagcagcattagattctcataggagcctgaaccctattgtgaactgtgcatgcaagggacctaggttgcatgctccttatragartctaatgcctgatgatctgtcactggcttccatcaccctcagatgggaccatctagttgcaaggaaacaagctcagggctcccactgattctatctacattatggtgagttgtataattatttcattatatattacaatgtaataatagaagcaaagtgcacaataaatgtaatgcacctgaatcatcctaaaatcatcccctctgccgcagttcatgaaaaaattgttttccacaaaactagtccctggtgccaaaaaggttgggaccacttatctaacacatgaggattttaagacacagaatagttaagtgttttgcccaaagttgcatagccagtagttccctttgctattttcccatactcaatattctcataattctttgtacagttccctatttctcgggagatttccaggatgagcaccttgaaaaagcaaaaacaattggaaatattgtttatgaagatcttgaagctggtaagagcatctgtgggtcaagaagtagggggaagaaaactgggcaaatcaccacaaagccaggtggtttgaggagttcagaccacattggcaagaggcttttgaaggatgtgaaggctttgtcctaaagtgcttcattctcctccatccttccaaacctcaagcaaaaggtctgtttagaatttagatgccttgaaaagagtcccttaacattactcctaggagtctggcctctctcagcactcattttttcatcctttgttgagatataatgtaccaaagtggttacatatgcaggctctgtcgtcagaccactgaggtttgaacccccaggcctatcacttgctacctgagcaacctcaagcagtgacttaccctctctatgtttctgctttatcatctatcaaatggaggaaaataatagtacgtagctcactgggatgtaagtttaaatgactagattatatgtagaaacacttagaacagtgtctctttcataagaaacactcaacaagtgttagctctctcccagtaatatcacgactgtctgctatatattgatcaccaaatttatatttcagtccccacctctcttataaacaccaaaaccatattcctaagagccttgtatatattccacttggatgtagtgactcacgctgagttgagtgtctaatgccaaattcatttttttactatagtgccctttcttcctcatcctgatcctgatccttgatttcattagtagcaaattatgccattctgtatcatttaaagttatccttgccttcttttttgcccacattcccgcatttactcactgccaagtcctactatttttacctcagtctctggaatctccttgtcctcccttcctattgccatagttcaggctcttatcattttttcctggactatttccatagctttccaaaaaactctgtgcttcacacctctctgcttcaattcatccttcatataattctcagagtatatgcaaatcacaccaacccatactttatactctcgaaataagtcccagtggtaataagataaaagccaaaagattttttttaacctagagaaatggtgctcatctttcaatgtcacctctttggtgagaacttccccagatcactagacatgactaattcttcttccaccaggcttctgtaaggctgtgaacacatttctagttatactatacactctatactattatggcatattgccattcattacttatatatctgtttctctctccctcaggaaatcgtgagcctctttttttttttttttttttttttttgagacagagtctcgytctgtcgcccaggctggagtgcaatggtgcggtctcggctcactgagacctccacctcccaggttcaagcgattctcctgcctcagcctcccgactagctgggactacaggcacgcaccaccacrcctagctaatttttgtatttttagtagaaatggggtttcagtatgttggccaggctgttctcaaactcctgaccttgtgatccgcccatctcagcctcccaaagtgctgggattayaggygtgagccaccacacctggcctgtgagcttcttaagaacagagagtctcttaacatttccatatcactattgatgagaaatgtgcctcataattgtacataataaatgatcgatataagttggtggcattgtattatatttataatacagctttcttcttttgtacttcaggtcataggcaagacaatatcagtagtttctaagtgtcagggcttagactgtttgcatcacaagtatttacaagaagctcctttaaaaatatggatttgtgagttctaactctaaagattaaaaaagtaggatgtggattgggcctaggaacctgtttagttgtttgcttttgttttaaaacttttcagttggtgctgaagcagaatcttgtttggaaactgctaccaaagctgtgtttgattatgtactgacaagtctttggaccattaactatctgtgtgaccctgggcaagttacttaacttctctgtgcccarattttctcagcaaatagattcaatagtaccactttatatggatgttgtgaggattaagtgagttaattatgtaaagagcatcccgcagtacttggaacatagtaagtataatgtaagtgttggctttttttcactttaraaagaacccaatcctcattttagattagaagaaaccaggccaatgttttattattgaattcatgattttttgttcctgctttattctcttcaatttatgaataattcattaacaaggctatcccaagattaaaacttaaatttctatctgccccatctttttaaagataccagtcaaactcaaaacaatgtagtgcttacctcctcattaattaaactgttctcagggctagtcaaagggctaagtatttggtgacagaacggggctgcaggagtagacttaggtatgtgtgaacaaggcaggttataacactttataatgactgtcaagcacaaagagaaagaatgggttaactcaatctcttctcagagggaaacaaaaagcagccattagcagtctggagcagtgagaactggggagccggttttctgcattgtgacaccttacacagtggtaaggcagagcctgctacgtaagtggttgacgctaaaatgtaggctccgtattttgtttgagactgtattcccagtacctagaacagcacctgaccctgatagatgcacaataaatgcttaatgagtgaataaataattcagactacttaggggagggtagtctatatgagaaaagggacctgtgatctgttttttaagtgcaacacataccacatttcaagctagaatagcatcggctgccagcagggcgaggactagttttgttcagcacctagcccagggggtgctcagtaagcatgtgctgaatatatgctggttgaataaatgtcaagtagatttccccaggacaactgtattgttcaatagattaaaatgactcataattaacaaaccagttatttttatgtaatgggcacttcagttagcttttgtgggtacccctaaaactccatctattctccaaatttgcactatctttacacaaagctttgaccaagtaagagtccattccagccagctctgtccaaatagccacaaattctaagttaatggaatataaatgaatgcaaagttactggaaagaaaagattgaacttagttctttcgctgcatcataagcaaaccaggaagctcaatggatacatatgcatacccatacatgtgtaaaaaaacctgacrtcctatggtgtttctctttctctttctgcatcttgtccagatagtgaaagaggaaaggattatttttatcattgatgaggcccagtttgtggattcgacctcctggagattyatggagaagcttatccggactcttcctatcttcatcattatgtccctgtgtcccttcgttaacattccctgtgcagctgccagggccgtaataaagaacaggaacaccacctacattgtcrttggtgcagtacagcctaacgacatctccaacaagatctgtcttgacctcaatgtgagctgcatctccaaagaactggactcgtaagtaacctctttctattctgaactctcgacatctgcatacattccctcggtctagacttcatcagatttcttagtatgtgtcttgatgtgcctatttcagtatctttcctggccccaccttttaaaaaatttttcttttctttttttctgttttcttttgagacagggtcttactctgtcacccaggctgaagtgtagtggtgccatcatggctcactgcagccttgacctcctgggctcaagccatcctcctgcctcagctttctgagtaccagaactacaggtgtgcacctccggtaaattttttatttctgtagagatggggtctcacagtgttgcccaggctgatcatgaactcctgggctcaagcaatcctcccayctcagcctcccaaaatgctgggattacaggtgtgagccaccatgcttggtctggtccaccttttgaaggagccattcataatgcttggtaggatggatgttgctcaccttttccatgttgcctccctgttacgccttcttaaactttgcttagtgaaaagctctatttccctttcatcatggggggtatgggtatactcactttaacctgcagtgactaagagcattgttatgggcaagtgacaggaaaggcaaactggtaagcgttaaagaccatgacctgccactaagcaaggtcttacctggctggcaatggtgtggtctggtattggtgttctctgtctatggcagatgtggaaagctgactcactggtgagtgctctctgagcttttcagtgattcctctcctggggttttctttgttttttgtttgtttgtttgtttgtttgttttttgttttttagacctagtttcgctctcattgcccaggctggagtgcaatggcrhratctcsgctcacygcracctccacctcccrggttcaagcgattcttctgcctcagcytcccgagtagctgggattgcaggcatgccccactacgcccagctaattttgtatttttagtagagatgaggtttctccatattggtcaggctggtcttgaaatcctgagctcagatgctccgccctcctcggcctcccaaagtgctgggattacaggcgtgagccaccgagcctggctctcctggcgtcctgacagcagtcaccttaacaacatagagaatgttttttctttagctggctgtttacagcccatcttagtatctgcaatgaggttgccctgcttctggaagraagatgtcttgaacaaaggctcatttaagataactccaggcaccaatttggcactcattctttctgtcggtctctctctctctctccccctctctctgtttaaattatatagaacatgtatatctttccaaagccaaaaaggtacatccttagtcttgcttccctcccttatcctataggtaaccattttkrttagtttttggcttatccttccaatgtctgttttaaaaactataaatcaagtgtgtgcacacttattgtgtacacacatgagtgaaataaaaagaaaacaaagcaatgcctcaaaactgaaaacaaacagaaacaaatgaagaatgacaagaaattattttcaagtgattgagaagacttacatatttttccttcctaaaagatgtatcttcaatgtaaacagattgccttgttttcactacaggtacctgggggagggaagctgtgggattccattttactgtgaagaattgcttaaaaacctggaacatcatgaggtactcgttttccaacaaacggagtctgaggaaaagacaaataggacctggaataacctgttcagtaagtcctgcggtgatggttctttcttactctgttctgcctaacttaagtcttcattcagagaaggtagcaaaaatgrgctattycacaggctgcttcctgtagagtcagaaggttctggggagccaggaattactggatccgatattccagattgtaagcgaacttaacattgcctgggactcactggactcggctaaagattgtctaactatggccgggcgcggtggctcacgcctaaatctcagcactttcggagcccgaggcaggcagatcacttgaggtcaggagttcaagaccagcctggccaacatgrtgaaaccccrtctgtactaaaaatacaaaaattagccaggtgtggtggtgsgtgcttgtartcccagctactcgggaggctgaggcaggagtatctcttgagcctgggaggtggaggttgaagtgagctgagattgcaccactgcactccagcytggkcaacagagtragactcngtctcmaaaaaaaaaaaaaaaaaaagtaactatagtagaaatgaaagaacattgacaaatcttaaggcccagaactgaagggccgctttgatgttatcttcaaaaagcctttccttttttgccagaggtaaaattgctagtacgaagtgagttatcaacaaagatcccgtgctacacagatatatacagggatgaaatctgaagtgatggcatgaaggaggccagttggaatttttaggaaaataattttattgcagggaaaagggtgggggccagagattacaagttggaaagcagagaattaaggctagatagagcaggctttaattgggactttttttgtttccactcccttggtgtttctgagttgctagattcttaagctctaagtcttgaacatgtgaggcaaaaagaaagccctgccatgggacccactgccacgtttttccttgggtcctaaggtccctagctggtctgacttctttccaccttcaatgwcatcttctgtttgttttacacataacgtctaggggttttaactatatttagcaggaggaatagggaaaaacataccaactctctcttcctggaattggaagcctcttcatttttttgtgactcaaattaagtaatacgatgatttaacagctataagcackacgtgtattaatattactaaacctagagggtcaaaacgtattcctctgcgactaaatttaaagacaagaatataggtgtgagatcagtgtcatgatgaggtgaatacggtgcaataaaggacttatggtgctgctgtctctatgtagcaggatagaaaatcaccacctaaaggtgacaatgagggaaatttcataaaaaagattcctcttgcttcctaaaarcccctgcctcctgggtgaatgaatgatgctcagatgtccctatccatgtttcagtctgtgctgcatctgttgcctctcacttcttgttcaatagcatgactacaggaccatgtggcccccaagggcacatctgtaggagaaatgagacagatggttgtctgagagaacagggcaaagctctaccttttttttttttaaggaacaagaaacattagcttgctttttaaggaaagatcaattttttttttctttctggatgattgtgatgaaaaaatggagaagactttctctggccaaattagttttaaagatgatagtggatcattaaatagataatgactgctatgattattatttttagactaaataattccattataataatattaagatgccaatggattaaaggaaagcgatatgtaaatataaatactgcagagtaaatactatttctaaattttatacatttgtttactttgtttacttgttcaataaatgtttatrtagtatccgttatgagcttttttttttgagacagagtctcactctgtcgcccaggctggggtgcagtggaacgatctcggctcactgcaatctccgtctcctgsgctcaagcagttctcctgcctcagcctcccatgtagcaaggattacaggcatgcaccactaccgcccagctaattttcatatttttagtagagacagggttttgccrtkttggycrrgctggtcttraactcctgacctcaagtgatctgcccgcctcgggctcccaaaatgctgggtttacaggtgtgagccactgcacctggccctgttatgagctttttaaaacacaatcaggtgtcttctctatttaaaacccttcagtgtcttttgtgtcttaattttaaaaaactgaaattaaggagagattctggttacataatattgtgaatgcactacaggccgctgaattgtatactttaaaataattaattgcatgttaggtgaatttcacttcaattaaaaaaataaatatgatacataatcctggactggatcctatactggaagaaaagagaatgttaaaggatattatttgatcaattcacaaaattgggatatggacagtagactaaagtattgtatcaatgttaaatttcttttttttttttttgagacactctgtcgcccaggctggagtgcagtggcacgatcttrgctcactgcagcctccgcctcctgggttcaagcaattctctgcctcagcctcccgagtatctgggattacaggcaactgccaccatgcctgactaattttttttgcatttttagtagagacggggtttcaccaccttggccaggctggtcttgaactcctgaacttgtgatccacccacctcggcctcccaaaatgctgggattacaggcgtgagccactgtgcccgaccaatgttaagtttcttgaaggtgataactatattctagttatatgagagagtgttggccaggtgcagtggcccacacctataatcccagtactttgggastctgaggcgggcggattgcttgagcccaggagtttgagaccttcctgggcaacatgacaaaaccccatctctactaaaaatacaaaaattasccrggtgtggtgtcgcacgcctgtagtcccagctacctgggaggctgaggtgggaggattgcttgagccagggaggttgaggctgcagcaagctatgatcacaactctccactccagcctgggcaacaggagtgagaccctgtctcaaaaaaacaaaacaaacaaacaaacaaaagagtgtcaatatttttagaaaatacagagtaaagtatttgggagtatagggtgtgatgtatgtgacttatattcaaatgcttcagaaaaatatgtacacatagaaggaacctaggatatagtaaatagggcaaaggctgacaacaggcgaacctgagtagggagtacattctgtctatcacccttttatttctttcacataattgaattacgagattatccttttaatgtatttatctattgtttaatgtttgtttcccactagaatgtgagcttcatgaggcatggagttttgtgctctcctgaatccccaatcctaggaaaattcctagcacctagaggcaatcagttaatactggttgagtgatggaaagaatggttgtctcaatgctaggtcctggaaggggaaataagcataaaatagcatggaccacgtcatatccttgagccccactctcctactcccaacacacacacayacacacacacacacacacacacacacacacacacacacacggccccctttttggtatgctatcctcccttggctttcctgaccccacactcctcctgttcccctctctgaccagtcctcagataatccttggctctctacctgggtctactcctcctgggacattcttcaagttctatccttaaccctttcctcttgctagcttgccagaattggaaacaactctctccccagttgttttcatttactcatctatttctcagccttcgtgtgtgtcgaaccctaacctcacccttaattccacacccatatttccaattgcccattgaactattccayagattcccttaaacttaataaatctaaaacttcatgcattatcctcccrctcaaccacccctccttctgtactycgtgtctctgtcacttctatcactgtcttgcttaggccccatttcctccatatctttagtatttgctttctccttgctgaaccacttgcctggttctatccatsctcacttcttgacattccattgttatagctccttacatagtcttccctgtcctagtctctcgccttttccatatgctgcttccagtggtaccttcctaaatacgactagttggattactactawctcctcttcagaaatctgtgacctttccctcttgtctataaagtccagtcttcatattatggtgtttaatgccctccatgctctgctcccaaactagctctccaaacacgtctcccacatagcacctgagcactccaggccctgcactttagtcacgctgggccgctccattcccctaactcgctaagtactctgaggttcctgtgccttcgcgttggcctctcctccacttgccgcttagaatatctcttcatccttcaaggatcaaagtacttcctcccctrtcaagcctttctgaatccaccaagtctgatttaattgttattttctgttcccacaacatgttactctttgctctttagctcttaagtcacccatcctgatgttataattagttacttatgtatctgtctccacagatttttaagcctcttgagggctggaagcatgtgttattcacattgatagccttcactggatatgatgcacagaaagtccttaataaatatgtcctgtattgatgtgaactctggtgcttactgtatgtgcccaatcacatggcactcatctactgcctggcagtccagctcttagtgtacatgacttagagctccaggaaataaggaacttggttttattcaccttcctatttccacctcacctagcacagtcttgccgctaccaaggactacatgaatggctgaagggatagaaaaataatgcattttggagtactaggaaaccaaattactaggcacatttactattcaaacttcaccatttaaaatatctctgatagtagctatgtcctaattagagtacagtgcctcacagaatgtgtttgtaactgagtgtgggtatgtaaatgtatacatacaaatatatgtttatgtatatatataataatacattctgatatacattatgtatatacataatacatatataatacattctgataatctgactgtgaatcaaacgtttgtaaagccttatatcctatggaagacatcaatagtgccaattcttttggttgggcagggttggcagagggagacaaaacatttttgagtacatctagattttcatgaatcagttttacttagaataaggtttccagcggcctggtgcagtgtggctcatacctgtaaycccagcactttgggaggccgaggcaggcrgatcacttgaggtcaggagttygagaacagcctggccaacatggtgaaacctcatctctacagaaattagccaggcatggyagtgggcggctgtaatcccagctacttgggaggctgaggcaggaatcgcttgaacctgggaggcggaggttgcagtgagcaaagatcacgccactgcactccagcctgggcgacagtkagagactccacctcaaaaaaacaaaaaacaaaacaaaacaaaacaaaaaaaaggtttccagaatatttggtgagccaatatacatctctgcccagtcttcctcatatgagatccatctcaaagttcattggaaaatcagaccttataagacaggataatgactcaacttttcttcccttttatacccctgtagagtattccattaagctaacagagaagttaaacatggttactctccatagtgataaggaaagtgaagaagtctgtcacctcacaagtggygtcagactgaaaaacctgtcacctccaacgtcattaaaaggtaagaaaatctggccgggcgcagtggctcacscctgtaatcccagcactttgggaggccgaggcgsgyggatcacaaggtcaggagtttgagaccagcctggccaatayggtgaaaccccgtatctactaaaaatacaaaaaaattagccaggcacacacctgtaatcccagctactcgggaagctgmggcaggagaattgcttgaacctgggaggyggaggttgcagtgagccactgcactccagcctgggtgrcagagyragactccatctcaaaaaaaaaaagaaaagaaaatctgacctggtatttattttctagtccctaaactccactttggctttctctaggatgtctgtttttaaaaggaaaaagaaaaacagcaacattggttgtttgtctgtttgctctgtactgcctgaagcagtgagaaggctcagggtaggcttggctttgctcctaagagccatctttccccctgtgtatattctgggatctgcataaaagaatgaaatattgtacattttcaattaaacagaaaccaaataatgagggagaaaatctaatactgagatacttcctgtcatccacttttatgagaaagaaatgacaaacgagtttatatgaaagacatattattggccaggcacagtggcttactcctgtaatcccagcattttgggaggccaagtcgggtggatcacttgaggtcagaagttctagagaccagcctgaccaacatggagaaaccccgtctctactaaaaatacaaaaaraaattagccgggcatggtggcgcatgcatgtaatcccagctactgaggagactgaggcaggagaattgctyraacccaggaggcngaggttgcagtgagccgagatcacgccattgcactccagcctggscaacaagagaaaaactctgtctcaaaaaagaaagaaagaaagaaagaaagatgtattattattcttttaaagaaaaatgactttcaaggaatgttttagtatgaactcagctccaattcatgccatccataagcaactttcaatgtttagaaaggtggcctagggacatctcaaggtcctcagtcttcaaaagagtgccatttatgtttcgttagctgtgtctactaatgtragaaggcagtagctcacacctgtaatcccagcactttgggaggcygaggcaggtggatcacctgaggtcaggagttcgagaccagcctggtcaacatggtgaaatcccatctctcctacaaacacaaaaaattagccgggcatggtggtggrtgcctataatcccagctactcaagaggctgaggcaggagaatctcttgaacccrggaggcggaggttgcagtgagcygagatcagccattgcactccagcttgggcaacaagagtgagactccatctcaaaaaaaaaaaaagaggatggactagcttagtttctactgtgwtttttgggcaagttgagaaattctaattttgtccctaacagaaggacatcctggtcaaaatgtccagaaagtcacatgagctaccgatattcaagcttagatgaaaagttgggataggagctgtgaactctctgacacttggtcatgacacagagatgataatgtatgtcatgagaatacataaatttctagggcagatagagagaaaccaggagtttctaggagaaaggggaggcagagaagaagatacaaaaggaccagctgaggaagtcaacaaagcacaggaatggcagggcctgctccttctgacaatagtgattacmatgtcctctcctctcctcacacacacttgtcacactttagcacaaaatcagaacaccatgaaatagatcttaattttgtcaggtcattgtgctgtgtgtctttctaggccataagcctgcatctttagtactcccagcacaagtgctatccacaaattaggtactaaacaaatacttcttttgacttagcttggctgagtttcttkcaacaagaactgtagagcaggatggttgtccacctgctctatattaaatacagcatattagataaagataaataactagttttctactgtgtggcyttctacctgcagaaatctctctgatccagctggatagcatgagactttcccaccaaatgctggtgagatgtgctgccatcattggcctgaccttcaccactgagttgttgtttgagattctcccctgttggaatatgaagatgatgatcaagaccctggcaaccctagtggaatctaacattttttattgtttccggaatggcaaggagcttcaaaaggccctgaaacagaatgatccctcatttgaggtgcactatcgttccttgtctctgaagcccagtgaagggatgggtgagtagcacctggagtgacccaatttcctcttaaggacccatctagatcaaagrattgacctatgttaggtagaaggggctgatctgttgcccactgcctggctgaaaaaccctttttgctctctccagatcacggtgaagaggaacagcttcgtgaactggagaatgaggtgatcgagtgccacaggatycgattctgtaaccctatgatgcagaaaacagcctacgagctgtggctcaaggaccagagaaaagccatgcacttgaaatgtgcccgctttttagaagaagatgcccacagatgtgaccactgccgaggcagggacttcattccctatcatcacttcacagtgaatattcggctcaacgctttagacatggatgccattaaaaagatggctatgtctcatggatttaaaagtaacctacttcattttaaaattatcctaactgttcttgggaaatctagagactaagatctagaaggmgtgggtgtggatcttgagggcttcaagtctcataagcggcttgggcacaaagaatgatgagacttcagcagcctaggccaatggggaagagaaaagtaagggaatgtacctgtattgagtctagcgaaccaatctcactataactgtcagggagggtttggggataggggctctggcaaaatgggatgtgaccagaactcaaactaaaatatcccacttaattcacaccaaaggatggaatccaaaggggggtacaatctgacaygatgacatggtgtttcttggcagataagaatattattgctttgttggtctagtttgaaacaggttccagtgggtaaagaacatgactgagagagaattagccagggctaagcaggtcagggctccagaaaacagggcttggtttcagggcaagaattcaagaccatcggagaagcaaaagttaaaaagttacaagccaataataccaaccagccatgtgatctgagaaaacatagcagaggattcagggggtgtaaggacccaaagactcagtcactatgggcatgatgggtgtcagacacagagcaacaccaccaattctagcccccattcatggtggccagggagctcctaatgggctgcctactctagtcagaggaccttggtgattatggctaaatctggttgggaaatcagaggctacaagtagaggactcctatattataaggatattaaaaatcaggaagaaatgtatctaaactgcctagtacatagcaggtgcaaaataaacttttttttctcattcgttctccatttcatgtgccttctcagtggatcctcatattaaccctttaaggttgatgagggttgttttcattgtatagattttttaaattgtggttctggaagcttaagtaacttacccaataccacagaatgagtgacaggctttattcaatctgccatcagtctaattcctaagttcatcctctgctcattatacctgagctcccccaaatgtggggttggattttaggtaatacttgccagaagataggaagttcgtagacacagcatgaagtagaaatcaagagaatgagaaagttgcagctttgcacagtgggacgagcatgttgttgaaactgcactaacactagtccatctccctttttggaaaacaggaatcaggctgtaggttcagagccttaggatctggaccatgaagatttttagtcctctgagagcttgagtacaaagaggataagacttcagcaatagtctcatctgcactgggcagggaagatgtcaggggaatgtacacctacctgagtctagttctattactagcatttattaaattctctcttgtttgttatatttttacaaaattggtaatattattatcacaaaagtggtatgtgtgtaatattatgttgaaattgaaatttgtgccagagcaccaagatacaactaatgctgcaattcaaactgaggcagtggatatacagaatttacaaaagaaatagctgagaatcaattataatcttggatccttcgcccagacctaagacatagaaatgaggaagaggatgtagagggtcaggatttgtgaagagatctctttggtgagaactgatgaggtgctgtgtgccctcctcaagtgggttgtttacttcatcacctcaagcctggtgaggtgtcttccttagaatcagaggacatagaacactggggcctgcctcatgcctaagaaggctgaagtggcctgtggctgcattgggatcaagctgccatcccagactgtgggaaaggatgtgtgagggtttctcatggatcagataaaacccacctgggagaaacagccagtctggaaccattttaagttcttcccagggtgcccttgggagggtaacaagacccttgggtgtggactgctagaatgagacagggataagggggacagactggagcacygagaagatgcgctgcctgaattaaggaagctttagtgaaggatcccacacagggccctattcaaagaaccaatgaaagtatcagtaggagatgaaatgatggaaagagatgagggaaaggggaaagaagaatatttgactgtgcggggtcagtgagtcatacatatacacacacacatacacatgtacacacacatacatatacatagatgcattttttggtagattgatgttttattttgggggataaaataagctaaaatacactgacagctagaatatasgtcagtttgagcagctggccttgagcaggttgactagtgtcatcaaagcaaacaatttcagttatttgcagattttccaatcaactggcagttcagctctggaacatatatgaccaaatgtctctgaataaygtctgctggtatcccttccatcagcacctccacctgagtgaggccacagctctactatttctcttatcagaatttttcacctgttcagaaggctatcgactcgayaaactttagagactttgtaaattccctaaatgtcgtatcacaaaacagtaatcccatggccgaccgtcccacacaccttcagtaattccagtcaggggcaaacatttttaatttagctrttctttctagtcattacctccatatactaaatggtatattaacattgcttttactgatttttaagaaaatcaaattctgacatctgttttctggctatggcagatgaggatttaactctgttacaccactcctcggcccctctcccctatattgtcatataactggcattagataagccaatgaagtgtttacattattaagactatgtaaatgttgtccattacaaaccaagtaatatactgtgaatagatttcttaacaaatgtttattttycctagggttactaggaaacgttttttttttgcagtgtcttccttaaaatatcctgctttaatctatcctagacagatagatactctgtctatcctttatccctgaacctcccaaagtgtggagtataacctttaggcaatactggtcaaggacataattgggaccaagtgtggtggctcacgcttgtaatcccagcactttgggaagctgaggtggaaggatcacttgaagccaggttcaagccagggctggttcaagaccagcctggacaacaaactgagactctgtctctacaaaaaactaaaaataagaaaattagccaggtatgatggcacacatctatagtcccagtttctcaggaagttgaggtgggaggatctcttgagcccaggagttcaaggatgcagtgagccgtgatcatggccactgctctccccaaaaggggaaaaaaaagacataattggaggagattcagggctactgcattatgtgtgaatcagatagggaggaagctggtagctggtccctttcaattctcttttgatcctcatgtccttcttaagaactgttattttctaagtcttgattcattccaacggtttaccctcctgggggctgtccttcagcttcttccacctatttcatcagtgactactcttctcactcctttatcttctayagatatgttgaactttcattcagcatttcatttactcattccacaattatttatttatgtgccaggcattgcttactgctctaggcatctgaaatgcatcggtgaacaaaacagcattctgttggagaaaagtagacagtggagaacaaaaacataataaagaagtaaatatctgggtgcagtgactcatgcctataatcccagtggctttggaggcttgaggccaagggttcaagaccagcctgggcaggatagcaagaccccatctcttaaaaaaagaattagccaggtgcgatggcttgtgcctgtagtcccagctactcaagagtattgcttgagcccgaaagtttgagactgcagtaagccatgttcaccctactatactccagcctgggtgacaaagcaagaccccaactcttaaaaaaaaaaaaaaaaaaaaaggaaagcatatagtataagcgataaatcccatggrgaaaaacagaaaagaatgttgggtaggaggagcgcagagccatttgggtgacttcactgcaaagcaagattcatgtaaagacagaggaagtgagggattttgctgtgtgagtggctggggaagactgttctaggcagaggggtagagaatgcagtgaccctaagacaggagcgtggcccttccattctatacatgttgaatttatacttttagagatcattttattcttgccaggcacagtggctcacctgtaatcccagcactttgggaggctgagacaggtggattgcttgagctcaagagttcaagacaaaccagagaagcatgatgaamtctccctctacaaaaaatacaaaaaaattagctgggtgtggtggcaggtgcctgtagccccagctactcaggaggctgaggtgggaagatcatttgagccagggaggttgaggctgcagtgagctatgatggygccactgcactccagcctgagcgacagaacaaggccctgtctmaaaaaaaaaaaaaaaaaatcattttattctcatttagttaggtaaaatgtcctgaacctggggagacagaagataaacccaagaggtagtctgacatcttgaacctaaagtcttagttttagttctttgaaaccataaggtgggcaggtgatatctttgcttttctcttttcatttgagaacctataggcatttgtatgtttttttcttttgatttttacagattctccttgtagtaggaaactcttaatataatatctcctttgtaaatgaaaaaaatgagaatcaaaaataatatgattctggttgggcacggttgctcatgcctgtaattgcagcactttgkgaggccgaggcaggcagatcamaaggtcaggagattgagmccatcctagctaacacagtgaaaccccatctccactaaaaatacaaaaaattagccaggcatggtgggacacgcctatagtcccagctacttggsaggctgaggcaggagaatckcttgaatccaggaggcagaggttgcagtgagctaagattgcaccactgcgctccagcctaggcaacagagtgaaactccatccaaaaaaaaaaatagtaataataatatgattcacccaagcaataaatgacataatgacaaagagcatacctcatatgccctgattctatttgctttatctatccaatctttgcatcccattctatcaccattaccattttttttttttgagacagggtcttgctctgttgcccaggctggaatgtagtggcatgatctgggcttagtgcagcctcaaacttccaggctcaagccatcctcccacctcagactcccaagtaggtgggactacaggcacatgccaccatgtgctgctaatttttttttcttttcttttttttttttttatagacaggtcttgccatgttgcccaagctagtctcaaactcctggactcaaacgatcctcccacytcagcctcccaaagtgttgggattatagggatgagccactgtgcctggccaccattacaactttaaacataaaaaatacatagaatgttgaagaaggaatagcattttcattttactgattgatttattttcaacaaacgtgcgtttatgcaacaaacatttattaagcgtctaccatgtgccaggaagtgacctagatattcggaccatagtagtgaaaaatggtagacatttattatcaatttttattttattattaagatagacatgtctcttcttataaatttgaattttaatggcaactgacagacaatgaacagattaagtaataaaatcttcaaggggccttgtagactttgataaatagtctaaatttcagtctaagtgaattggaacacattggaaatatatcaattagaatgagtattggctgcatataataaggacctagctagtgtggcttaaatttatttattattaaatgtattgtatttatgtatttctcatgtaaaaggcttgcctcatcactgggactagtatggaggcttcatgatcatcagggtccttggtccaaaacagctgctgaggctccagccagcatgtttaatgccagaaggagaaaagaagccaaaacatgaaaggatatcccctcccttttaaaggatcttctaaragtcctacccagtatttcctcttacatcccattgatcagaacctactcacatgactatatccagttgcaagggaagctgaagaatgtcgctgtctattactaatgagaaaagggacaatggagattgagttgggaaaccggcagttcctgccacagagatctgaatcatgctttttaaatggtactgccttctctacagaaagagattgaaaaggataggaatagaagggagattagttttttgcagttgtmcaggtaaaattttggtaatggactgaggtggtgctgtagtgaagatggacagaagacgatgaattcagatatgtttttgggtatggtcaacgggactttctgatggactgaatagggaagggggtaagaaaaagaaaataatcaaggatcttgcrcaggtttttgtcttgagaaaatggatatatgacagtgatgcttactatgttaggaaaagttgtaagtgggtataagtttctggaggagagattcgagagtttctgtttgaatcatgttaattttgaaatgcctattacacattcaaatggcagttgccaaggtggtatttgaatatatgggtctgtagttaaagtagatgtcgaggcttagatatataaaatggaaatccattagcatatgaatgtaattaaaagtcatgggcagatgaaactgcctagggagaaattgtgaaaggagaacggagcccaggaccaaactgaggtttaccamcatttagaatgttggtagacgaatagtagccaattaagtaggcaaccaattcccttataacacacaaaacaatgtgtgctaaaagaatcagtgaaaagggagagtggtcacttgtattaaatgctgctgagaggtaatcaagtgcagacaaagatgtagcctttggatgtggcaacatggtggccacaggtaactttaacaacagcagttttagagaagtagggggacagggtcataattcaatatattcagctgctagtcactaaggaatcaataaatagtaatctaggagaagaggtggccaaattgatctctgtgcagtacaataaggactatgatacaggtctgcacagggttgacgggcacacaggagttggggtacttatctatggaggcaagagcacagagggctttcagaagaaggtggtaacttcttagatgttcaaactgcatctataagatgtatggagtaatgcattagcctgggagccagaaaacctaagttctagtcctgcctccaccactaacagatgtatgacctgagacaagttcattcccctctctgggattctttcttctgcctgaagggagaaatggctggactagacaagcctcatttgttttctgttttaagatcattatggaattttctaacctgttcaagtctgcttagactgaggtttttaatttaagattctctgcccttcagttaaccttttggggtatttcatttaattatctatatttctccactggaaattgatgtcactttcttcaggtttaattcatagtttttattgcagaataaatgagttaggataatgttattarctatcacaaaccccagcatttctgtggattaacacaagagagtgattatttccmccttatgaaataatccaatgcaagtgttgaccaatggctttgcatgcagttagcaagggacccaggctcctcccaacttgtgggtttgctatccttcaggttcttagaattacttgctttcttgtggaaagagaaggcagagaagacacataaccatcttagcctagaggtgacatatattacttctgatctaattctattgtgagaactcatcaygtggcttcacctaagatrcaatggggactaggcaatgtggtttctggctgggcagcaacaactccgwaaagsgaacaagagtcttgggtagacagcagatatctccactgcagagaacatttcaatgacccatacaactcatttgtttattttctagctgaagaaaagcttatcttgtccaactcagagattcctgagacatctgcattttttcctgaaaatcgcaggtagaggcatatatcattgtttaggaagtagagcataaataattgtcattaaattcagaacactattagaatcatttgtctggccagtacttttgacctcttagatgcaagtgggaaactttggggggtatgcatggtgagtttagtcagtagtatccacactaggttttattatcctgctcttttgtttttraagatattttattttatttatttattttttcaagatggagtctcgctctgtcacccaggctggagtgcaatgccacaatctcagctcactgcaacctccgccttctgggttcargtgattctcctgcctcagcctcctgaataactgggactacaggcgcctgccaccacmcccggctaattttttgtatttttagtagagaygggatttcaccgtgttagccaggatggtcttratctcctgacctcgtgatccacttgccttggcctcccaaagtgctgggattacaggcatgagccaccgcacccggcctaatttttatatttttagtagagatrgggtttcaccaggttggccaggctggtcttgaactcctgatctcagatgatccaccagcttcggcctcccaaactgctggaattacaggcrtgagccaccgcgtctggcctaaagatattttaatatcaaaagtgatactgtrtaagttactattatttatttctgcatatggacagtcctgaagaaataagagaaaagatcttgaatttctttgaccacgttttaacaaaaatgaagacatctgacgaagacattatccctctggaatcttgccagtgtgaagaaatcctagagattgtcatcttgcctctggcccaccattttctggctttgggagaaaatgacaaagccttatattacttcttagaaattgcatctgcttatctcatcttttgtgataactacatggtaagctgtttctacccagaccacctccaccctagagacaattcatagaacatagagccagaaggaagctccagcatgctttctgattacttcacgttgtatattcccgacagcacccctttccactgaaaatcacattgcttagaagggaaatgatctaagattgagaaaagagaattggaatacattgcaactagcattgtaaattatttaaaatattgccacctttagaaacttgccatgaattgtctacctgtatgggaggtaagggggcacatctcattcccaaaatgatgcagagaggactctcagcatagtcttcctcaagtggcatttaccctctgttaascctaaaatacctgtgagcacaaaatacctgtaggtctttggataagtgcaattctggttttttgttttgtttttgagatgaagtctttgtcacccaggctggagtgtagtggcgcgatctctgctcactgcaacgtctgcctcccgggatcaagccatcctcccacttcagcctcctgagtagctgggactgcagacgtatgccaccatgcccagctaattttttgtgttcttggtagagatggggttacactatgttgcccaggctggtcttgaacacctgagctcaagggatctgccctccttggccttccaaagtgctaggattayaagtgtgagccactgtgcccagccaattctggttttaatattgtgatccccaaagaggctctccctgcctttgtcatcatgcaatgtgtgctagattattacacataccattagaccaccaaagcactagygaatgtttctctagggtaattataaataaggttccagggcactatgcccatagaaatgaggggatttgatacacatgatgaaataaacagaattcattgttaagtaagttggaaatcactgagctgaatacaggtaaatagatgcctttagatacttcagggcctttgatatgctgagatatatatataaatctgttcagaggacacagaagggtaaaggccaggctaggctgaagcatactgtgtttctcaaacttatttgcccttagatctcttttcatggagcagctggctgggctaaccttccatgaactcacttraggaaatgtctttctgggcccttgcttcatctgacttcagccagcttcaggaagagcttcatagaccttccataatttacagttgctactggtcacagcagcctaatcaaccctcctaccttagatttatataaaattataaaattaaactrttaaaaatgtcactaagttcctgtccttgaaacatttatgttaagaatgaaagtctcctgcatatttcatgcacatattcgaggtgatgatggggatgtagccaatgagtcccaggaggaggaggcttaggtagccctgggggccaactttctaaaacctatgcataccccgtttcacttgacaagaagacaatgattagaagcacagcctcagtgcaaggtcccagaatgtgacatttgtaccccctctcccatcaaactccagtgggactggggctggtggccaactcatcatgtctccctctttttttgcctcccacacatacccaacaggatgcatgagactgggagatactgcctcaccttattwtattcttcaagtctgatcttaccttggtgtgcacacgtgctaagatttgcctaatgatgttgggaggtgaagmtgaagtgatgagagttgtgcagggacttacttcctcatccacctcccaaaatgaccctggcaaaggaagtgggggtgattcataattcatttaaaaactgaagaccaacttctcacagatgtggggatgctrttcaagggaagtggatgtgttgttgggaatagggaggttggggatagaattattgagaggaagaaactggcttgagggaaacttcgggtaaggcaacctagatgatagtgtgaagaaaggtggagatttccagattcattctcttgatggagtgatccagcagacaaaggtaagcatgaaggtgagatctttacccatcagctcctgtctggaatttggaagcccattttaatcagtggagctggggatggaagtggaggtggtaactgaaatggctcctgcatctcttacttcagtagagtctggggcaatggcccttctgtgggctcaatccctgctgawtcaacacttttctactccttgggctggttacaggcatacatgtatttgaatgaaggacagaagttgctaaaaactctcaagaaggacaaatcttggagccagacatttgagtctgccaccttttacagcctcaaaggtgaggtaagaaaccattaaagacttgaatttatctgttatatatcttaggcctttccatagaagtagaagtcatccctatactttctacaccctcctcccatctcttgccacagacttctagccaagactctagaaactcaaatccctgggctccaacctcctcaccatggcttaccagcaagatcttccctgtcttccaggtttacatctttttttttttttttttttgagagggagtcttgctgtgttgcccagcctggaatacagtggcgtgatatcggctctctgcaaattccgtctcctgggttcaagtgattctcctgcctcagcctccaaagtagctgggattacaggcatrcgccrccacgcccagctaatttttgtattttagtagagayggggtttcaccatgttggccaggctggtctcraactcctgacctcaagtgatccgcccgccctgacctcccaaagtgctgggattacaggcgttagccaccgtgcccggcccaggttgacacctttatgaaatatttttgttacaatctctaaaaatggacctgaatgggtaaacattgtctcagaggtagacaatgcacaactaagatgctaaatcctagtcattcaaccacccttcatgcatatatccaatagacattttctattatgccaggcacaggaagattttgtttctggtccataaattaccttttttgataagaatccccaaaatatggattgttgggacctactaattaagttagaatcatcgttttcctcttttcctctcttccctcccacctccctgtaggtctgtttcaatatgggccagatagtgcttgccaagaaaatgctgaggaaggcactgaagctcctcaaccgaatctttccttacaacttaatctccttgtttctccatatccatgtcgagaaaaacagacactttcattatgtgaatcggcaggcccaagagagcccacctccagggtaagggaaggagctggggagagcagactgtttagtctcactccccagagaggcctacacataatccaagtcagcccccaaagcctggcctccagggggcacaaggactcctgtttggctctgaccattcactggggagggggcgagtgtgggaggygctcccataccagggttgccacaaagtactttacaggcagtttttgccaaagggaattttgatgactcaaacataagggacctcgttgtaaggtaagttctagggtccgtcctaactcatctagccctttaacccccatggccatccgtgttctcattggatggaacctgcaccactgctcctgggacctcagtcacaagccctcttccattaggtgctaagacactgggttttgccccgccccaaagaaaaatagcaagccctgaagacatttgccaaaggacaaaactcccacccatctaggaatctcaatagggatatgggttacatggggggtatccgttggtcaaaattgtactgttaagatttgggcatttcaatatatataaattctacctataagataactataataataatgagtgggaagaaatagtgagtggagaggtagatgaaataagcatgttgctagttgttgaaggtaggtgttgagtgcattttgctcatcatactcttgtttgctgtgtgtatgcttgaattattctataataaatgttttcaaaaatattccacctatctagcaattcatggcaaaggagatgcctccttgttgggtacctggagagctgacagaggacacctcttccatcttgggggagctctgtagctatattactataggttctgcctaagatacaaacatctattcctacgagcaagctactacaactcttttgcaaccccatcagaaactgccttccccagcttccaaacatgttcctttaaatgtagggaatcctgaggtgaaaaggaaatgtaatggagctgagctcctgtgcacgttggaggtgggctcctgggaaaacctggctgtttctggaaaccccaagaggaagggctgggagatgttcagcagagatctctctgagaaggcagtggtctttgcattacacatagggttgcaggatgcctcaatttgaatttcagataaacagtgaatactttttttagtatacatctatcatatgaaatatttaggacatatgcattccataaaaattattaggtttaaaattcaaacttaattgggcatcctgtattttcatctgctaaaacaggtaatttacacatttcacattttgtaaaaggagtaagaagtacctgcacaaagggaaaaggtagaaaagtgttgaagaagaaaaaactgaggagctgttggcttaaaatatccacaggtcaaaaggttctcatctcaaaaatgagtatgacatggaacaacatttaatgtcagagtgtccatgaccctcacgaatgccctataagagattttacccagggctgggtgttgtggctcacgcctgtaataccaacgcttagggaggctgaggggggcggattgcctgaagttgggagttcgagaccagtctggccaacatggtgaaatccygtctctactaaaaatacagaaaaaatttagccaggcgtggtggcgtgcacctgtaatcccagctactcggaaggttgaggcaggggaattgcttgaaccagggaggtggaggttaaagtgagccaagatcgcgccactgcactctagcctgggygataaagcgagactccgtctcaaaaaaaaaagagagagagattttaccctgtccatgtttcctaagaacctttaaaaaaaatcatttccacatcataatttagaaagtttattttgccaaggttgaggacacgcctgtaacacagcctcagtaagtcctaacgacatgtgcccaaggtggtcggggcacagcttaattttatacatttggggagacaggagacatcaatcaacatatgtaagaagtacattggtctggaaaggtgggacaacttgaagcaaaggcaggaagttgggagggagcttccaggtcacagataggtgagacaaaagttgcattcttttgagtttctgattcgccyttccaaaggaggcaaatcagatatgcatctatgtcaaagggcagaggagtgactttgaatagaatgggaggcaggtttgccctaagcagtttccagcttgagttttccttagtgattttgggggcccaagatattttcctttcaaaatgcaatagttaaaaatgctcattttttggccaggcgcagtggctcacgcttgcaatcccagcacttcgggaggctgaggcrggcggatcacctgaggtcaggggttcaggaccagcctggccaacatggcgaaaccccatctctaccaaaaacacaaaataattagccagacatggtggtgtgtgcctgtaatcccagctactggggaggctgaggaaagagaatcgcttgaacctgggaagcagaggttgcagtgagctgagatcatgccactgcactccaacctggacaacagagcgaggctcaaaaaacaaaaaatcctctttttttttttttttgtaaactaaaaagtacccaagacaggtatcaatcaatctgtaagtttattttgccaaggttaaggacatgcccagaagaaaaaaaaacacaaaaccacagraacagtccctgtttgagactgcagtatttaaaggggaaaagtgggctggaggaaaatgagggagggcgtgataataatccacatgttgcaagagaataggagcagctaggggaatagtcaattatgtattgtctcacactcagtaaataggcacttaasgtaggataaggcagacatagagtagctacccgtgcagatacttaactttttatctgtagctgtctgctaaggaacaaaaggaaaggcaacttcttgcatgactcagctttcagcttaattttttccttttggcatagtgaattgggatcctgagtttttattttcctttcacacctttgttgagctgagaagtagttcctgaaagcagtgtgcaatggagaaaataatacattgggcttttgggctggaggtagatggagtttgaatcctggcaccaccacattccagctgtgtgtctttgccttaattacttaacctgagtctcaccttcctcaaatgtaaaatggagtcagttattccactcttttcttacaggattgtcatcagaatcaaatgtgatgaataatatcaatgtgctttttaaatagcttcatttagcaattacctgactcaggacagatgctttacataaattatcttaatcattataaagtaggtattatgattcccattttacaatgaagaaaatgtgctccataaaaattaatgtgcttgtttgtcagtcatggagacaggcctcaaattcaagtcagttttgattcccaggcccatagtgaggacaccatgtacctgtgctcccctaaatcatggtaatgatgatacctttcatgttccatttgtgtttaccttatccaataggaagaagaggctggcacaactttaccggcaaactgtctgcctttccttgctgtggcgcatctatagctacagttatctttttcactgcaagtattatgcccayctggcagttatgatgcaaatgaayactgcactggaaactcaaaattgtttccaggtaggggatttttgtagctgctcctttaagtttctgaatttcatttgggaagaaaagcctagtgaaagccaattaggattcaaaattctgaggatataataatagaaggctttytgattggcttgttttgacaaggccagcagttctcaaacactttggctctaggatcacttcacactcttaaaaattattgaagatcccgaatagcttttattcatatgggttgaatctattgatagcatataagaaacaaaagtcgagaaaattctaaaatattattattattatttttgctggttttttttgagatggagtcttgctctgtcamccaggctggagtgcagtggcrcratatcggctcactgcaacctccacttcccgggttcaagagattctcttgcctcatcctcctgagtagctgggactacaggcrygcgccaccacacccagctaatttttgtatttttagtagagacggggtttcaccatgttggccaggctggtcttgaactcctgacctcaagtgatctgcccacactggccttccaaagtgctgggattacaggcgtgaggcactgcayctggcctaaaatattattttaaaataaagataacaagcctattacatattaacataattaccattttcattttttaaaactctgttccgcaaacaaaaaatgggaaatgtggcattgtattaaatttttgccaatattttaacatctggcttcttagaagacaactagattctcacatctgcttctgctttcactgttgcagtatcacatatgttgcctctggaagactccagtgtatattcatgagagaatgagggtgaaagagaaaaatgttaaaggataattcttttttaaaaagatagaattataactgataacaaatatggaaagtrcacatcaaagattttatttaactcactgagttgactcaatcaaaattagtaagattggaaccaagtggttccaaggagaatctgtttaccaatggatacaaaacttgtctagtaacagcataataatcacttgtattccactgaatatttacatttctatgaaaaacaaatcatatcacttatattaatatcagttttctgcaacatagttgtaagatagtccaaagaaaaatagagataactttgattagtaagctagataggatccccactaagttgtgtttttgcccattttaaggtctttcactatttttcctgtcacaaataatgcctggatattagcggggcatggtggctcacgcctgtaatcccagcactttgggaggctgaggtgggcgratcacgtgaggtcaggagttcgagactagcctggccaacatggggaaaacctatctttactaaaaatacaaaaattagctgagtgtggtggtgggtgcctgtaatcccagctactcaggaggccgaggcaggagaattgtttgaacccaggaggcagaggttgcagtgagatgagatcacaccattgcactccagcctggatgacaagagcgagactccaactcaaaaaaaaaaattttttttttaaatttaaaatgcctagatattatggaactagctttgacctcatgtggtctctgaaaaggtgccacggatccctagggctcccaggatgaattgggagaaccactagtctaggtcataaccaaagaagcctttgactggatgaagaagatatcaggagacatgatcaagaaattattaagctaaatcaaactcatctaatgagagtgaccttgctcctttataaaagtacattaaatcagcaggccgggcatggtggcttatgcctgtaatcctagcactttgggaggccgaggtgggcggatcacaaggtaaggagatcaagaccacggtgaaaccctgtctctactgaaaatacaaaaaaaaaaaaaaaaaaattagccgggsryrgtggygggcgcctgtagtcccagctactcgggaggctgaggcaggagaatggtgtgaacccaggaggtggagcttgcagtgagcagagatcactccactgcactccagcctgggcgacagagcaagactccrtctcrggaaaaaaaaaaaaagtacattaagtctgggtttcttcctcctggagtcattagttgtcaagaattaagggaaggggtcaagtagcaccaaggagctactgttggaggagcttagattcctaacctggagtctgtcctctacattagttccttttggtgaatttaggctggctctcctagaatacagaagtatttataaagcccatcaagattgacccctgcctatttcccatcctcttctagctctgtaggccatgaagtagccacaagcccagccatattggtcctcttttggttcctcaaacacagaagtttaatcccatctgtcactggatgtttcctctgcttggagggaactggtcatggccacccattcactttctaacttgtcactctgttttaataggtatgattaccatttgacaatttcttgtttgctcctgcattggttcttggtctctctcccttaccagtgtgtaaatcccttggaagcaaggacctcttcagctgtcttgttcacatcctaagtttctagaacatttgcagttgctcaagaaatttatatggactgaaatacttctccacacttggagctatatcctaagaattgtggtagagttggggtggggaaaataaaaagtcaggatagaatgtgaaccaagacatttgtcatcaaggtggctgggattgaaagcaaagaagcgctcccctcagtgctcaaaggcaggtgagggactcagcatgggagaatggaaagaaccagactgagagccagagggtggtttccaggactccgcctatctgcagtgtgaccactgaaaagccgcataaacaaggagctttatattttctctgtaaagtgaagcagttggacctccattctcttggtccaaatccaagaggtcctaggctttattacagccttggatttctcgtgcccaacacttctctctycccccaccaccatttctggctatccttaccttctggtagcattatctggaacatgttccaaaccagaaagaaaggaattctctaagactgatgtggtttaagtatccagggacctgcctataacacagaatttgtaggctgcttattttgtcccatctgaggaattccaagaaaaaagcctctactctaaaacacttccccgaccccaatactcccaccactagagatactttatttttcctgtttgtatttttcaaagtagtttacatgtattattttgtttttgtatatataataaaactgcttctttagaaggaacccttttctcctcactattctctaagcatgtatactctgaagcaactttatctttttaaagagttgtttagagtaaccagtttctcttaaatctgcaaattagatttatttgtttgttcgtttttgagaagggtctcastcagtcacccaggctggagtgcagtggcrtgatcatggctcactgcagcctcaacctcccctgctcaagtgatcctcccaaacacctcagcttcctgagtagctaggattacaggcttgtgtcatcatgctggctacttttttttwaaatcttttgtagagatcaggtctcactatattgcccaggctgggctcaaactcctgtgctcaagtgacctctcgtctcagcctcctgagtaggtaggactacaggcatatgccaccatgcctggctagtttttgttgttgttgaaacagggtctcactattgtgcccaggctcatctggaactcctgagctcaagcaatcctcctgcctcggcctccagaagtgctgggattatagatgtgagccactgcacctgacctccaaattaggtttaaaactagtccttatttaaaaaaaaaaaaaaagccaaacaaacaaaaccaacctttctttcttttttgttaaattacaaaarttatacatgcttgttataacaaacatcacagaggtgcataaagtaaaatctctcctcccacccccaacaaatatataactactgtttacactttggagtgtatcyttgcagcctttttgctctgcaattatacatctaatatgtaagctattgcttttatttttcacagaaattaaaatttttatatttcatttaaggactacatgggcaaggggccatcaagcttatcctgaatgactcagtaaacaggtagcagaaacccaatttgatttctatttctaagcccatggcttcggccaaatgtccagctctattcccaaacttaataaacaaacatttactggcagacattgagtgatgttcctgagctttctgctttgygttctgcctcactcttcctccactctgccatttcagatcattaaggcttacctagactattcgctataccaccacctggctggctacaaaggtgtgtggttcaaatatgaagtcatggccatggagcacatcttcaacctccccctgaaaggcgagggcattgaaatcgtggcatacgtggctgagacactggtcttcaacaagctcataatgggacacctggatttggccattgagttaggtaagggctggctgggcaagatgggacatgaggatacaaggaatgccccacaatatactggaattgttttcttcccaggctcccgagcccttcagatgtgggcactgctccagaatcccaaccgacattatcagtccctctgcagacttagcagatgtctccttctgaacagcaggtatttatcttaaagcattttccaaaattagggggaggaggccrtattattgagtattctgggttcaactttagcctagtcctagggtggggaagggagtagagtttgcagtaagaaaatgtaactgatagtagtcacccttttttcttttttcagacagagtcttgctctgtctcccaggctggagtgcagtagtgcaatcttggctcactgcaacctctgccttccgggttyagrcaattctcctgcctcaacctcccacgtagctgggattacaggcaacgtgccaccacacccagctaatttttgtattttttagaagagagggggtttcaccctgttggccaggctggtcttgaactcctgacctcaagtgacccacccacctcagcctcccaaagtgytgggattacaggcrtgagccactgygccaggccttgtcttttttattttaaacagaattctttgccwtgcatcatctctaatctggttgctctggccagtgatcagagggtagtcagacagtcatcccagctgtgggaatcaggcctccacttctgtcaggtggagacaaagggaaaagtcttccagggaggcaaatggccagagaatagcaaccaggactagaggtcaaggccaatttgctctgactctggtcaccctgatatagaggacccaggaaagaacaatttgaaaaaagagccaatttgagattgaggttttagtcctggataggggtgtgtttgaaatctgtttaagaggtatatttggttccgaattactgagaaggaccaagrctagaccaggaagggactttactgaacctcatcctatccactgctttttttattcaatagctttgggggtataartggttttcggtcacatagatgaattttatagaggtgaattctgagattttagtgcacctgtcacccgagcagtgtacacatacccaacatgtagtcttttattcctcacttccctcctcccctcccctccgagsccccaaagtccattatatccactgcttttttttttttttttttttgagatggagtttcgytcttttgcccaggctggagtgcagtggtgcrttattggctcaccacaacctccgccttctggtttcaagcgattctcctgcctcagcctcccaagtagctgggattacaggcrcccrccaccrhgcccagctaatttttgtatttttagtggagayggggtttcaccatgttsgccaggywgdtctcraactcctgacctcgtgrtccrcccacctcagcctcccaaagtgctgggattacaatatccaccactttttaatggccactaccttttcttttccatagatacccgcaattgatccaggtgctggggcggctgtgggagctttctgtaacacaggaacacatcttcagcaaggcatttttctattttgtctgcttggacatcctgctttattctggtaagtgtgggtttgggatgtaaaagaacttgggggtgttgatacctgtgctggtgtggtgtggcagctctcaggttggggctttgggaccactaggtttctggctggtggacttacagggcagggatggagagaggctggttgtgtgagctgaagcactgtctagmaggtgccgagattgtaaaggcacggcaaraaggagaattaagtctgaaggaacctgatggatatgagctgccagttaaactgtcagatcaatttgcacctaagtgatagtggctgactgtcttactatgtgccttttaccaggggtttttaacttttagcaggatgtacttagagacttcacgctttagaatgaaggactagattgcttgaggtgagagttccaggctggtagctattggtgatttggaaaataagttacttcctgataaccttcaagtgacaccaagtaggtcacttgaagtgtacacactaaaccacaggaaccaacctgaattgttttccccacatgtgatcttgaaaggggatgcagacattgccatcaacaaaggaagcatgtgtggagagacagagaagtcctaggctgcactaaggccaggaaggattagtttaaaccccacacctgcctggtcggtactgtggaactgtagtatatatccataacactccccaataggtaggactcagcaaacacagggcaatccagtcatgaggttgttgcaatccacgggaccctctggattcatacaataatcagaggcaactctccctgcagtgggaaattcaactgagagtgactaggctagaaagatgatcacccacacctactaataactctcacccattcctctctctcttaggttttgtttatagaacatttgaagaatgtttggaattcatacaccaatacgraaacaacagaatcctcaagttccacagtggactcctcctgggactttattcctctgtagctatctggtaacaatgtgtggcatatcactaaattcccaaagtgaaaatgttgaatcccaaggaagagttcttgaaaaatcttttagaaagtattcataatttatacctgagacagcttaagggtgtcagaggatatttacacagagagacatgttagggatcaactagttcatcccccttggccaaggacagaaaagtaaatttatctcaattacatccatgcaataaacatttatcgcaaacatatcatgttgtggtgatacagggataaataagaaaagattgctttcttcagaggggtgctggggtttgaggaagactaatgaatagcaccacttgcccacccggcacctgcccatatctaatcacatggattgacaaagccaatgttggaagacatggcttatatcttcacgaaagcgggcttcgtaatattgagcactggaattagacttaacccattcagcagcaggcagttctggaaaactgtaggtctactcacatggaggcaggcctcttgtagcagagagatcagtatcacactccctgttggcttcactggctctcaagatagagagagacacggactgagttatacttgcccaattcatctcccaaatcaccagcaagatctctccttatcattgaargggcaagtaaagcggggaaagagttctggtgctttgcaccaaatagaggccccttacatggaaggaaatttcaggagtgaggaagcagcattctccccgcaccccattaactcattaagcctaaggctcaattcctttaacctactacgtttttaactcagttaagcatgtagctattatggtcatacccttaaggaaggagatgaatgctaaggttctaaaatgggtcagaacagaacattcattaaattatttccatgactatccccaagactgaaaatcgccccctattattttatttcctatcttaattatatgcaaccgtatggtctatcagaggtttgtgatgagactaaatgacaatatgaagacattcctatataaaatgctacaagttagaacagctccaaattggaatagaaatccaccccttccttctttctgagacagtcttgctgtgtcacccaggttggagtcccgtggtgcgatcgcggatcactgcagcctcgccttcccaggctcaagtgatcctcccaaacacctcagcttcctgagtagctggagttgcaggcacataccaccwcgcctggctaattttaatcttttgtagagatgggatgtcgtgatgttgcccaggctggtctccaactcctgggctcwggtcccgtctacctcagccttcccaaatgctgggattacaggcatgagccactgcacctggcaagaaatcccctcttattattaaaattaatgaggagaaattaaaatccaaaaattgattactcttgccaattaaagttcaaaatcaaataacttaccaatgtgagttaaaggttaaggaatctaaagtccagaaatcatccaaatttatttttcttgtctatctcagcaggagaattttttaaacagctgtgtcctaggccaatgctgctcagactttagtgggcataaaaatcacctggagggcagtcggccagctctcggggtgctgagccaggcgggctaggcgaggcgcgggctggccccgcccctctggccggccccgcccctcaaggccggctagtccccttcccagagacttggctaggcggccggcgctgcggcgycagcagccctgtggtggcgacgacgatggaccaggasccagtgggccctgtggaacgaggagaagccgtcgcagcctcgggagctgcggccgccgcggcattcggggaatctgcggggcaggaaattaagggatccaaaaagctgagtcatggtccaaaaggaaacgttgatgtcaggacaaccatagccaaattttatctcaaggatgagtaacgaaagaggctttgaaacgtagaactgggagtcataggaaaaaagaagaaagtcccaaggagagtcatccactttgttagtggcaaaacaatggaagaatacagcacagatgaagatgaagttgatggcctggagaagatgttttgcctactgttgatccgatttggctttaaatatttggctattagaaaatcatgccgggcgcggtggctgacacctgtaatcccagcactttgggaggccgaggccggcagatcacctgaggtcgggagttcragaccagcctgaccaacatggagaaaccccatctctactaaaaatacaaaaaaattagccaggcatggtggcgcatgcctgyaaacccagctacctgggaggctgaggcaggagaattgcttgaacccrggaggcgaaggttgcggtgagccaagatcgcgccattgcactccagcctgggcaacaagagcaaaacttgggtctcaaaaaataaaaaaaaataaaaaataaaaaaatcataagcaggccaggagcagtggctcacgcctgtaatcgcagcactttgggaggctgaggtgggtggatcacctgaggtcaggarttcgagaccagcctggccaatatggtgaaaccgtgtctctactaaaaatataaaaaattaggcaggcgtgatggcaggcgcctgtaatcccagcgaggcaggagaattgcttcaaccagggaagcagaggttgcagtgggctgagatcgtgccattgtactccagcctggtcaacaagggtgaaactccatctaaaaaaaaaaaaaaaaaaaaatcggattttctacacagaaaatattcaaaggattgtaccatatactctgaaggtagttycaaatgcaggtagamtattaaagaggtatttcatgcaatgtaagaattgttggaataaatgtcttatttttaattactttgaagggttaaaaaaaaaatcacctggagagcttgttaactcagagatgccacacccccagagcctgtctgattcagtagacctggactgaaccagagaacctgcattaatgagaatccaggtgatactgatgatgccagtctgtggactacattttgagcagtactggcctaaatcatctctctttggtattggaacaatttcttcaagccccagaatccacagctccaagtgtctgatctccctcactttttaatttaaaaagccaaagtggccgggcatggtggcacagcctgtaatcccagcactttgggaggccaaggcrggtggatcmcctgaggtcaggagttygagayyagcctagccaacatggtgaaaccccgtatctacttaaaatacaaaaaattagctgggcgtggtggtacacacctgtagtcccagctactcrggaggctgaggcaggagaatcacttraacccaggagrcagaggttgcagtaagccaagattgtgccattgcactccagactgggggacaagagcaagacttcgtctcaaaaaaagaaaaaaagccaaagccaaagagttcaatggtggctaatattacctgagtgtttccaaggattctattcatctcaagtcatcaaaaaaatttattatttccttgctctgtatcacataatttcctgcttttttagggagtgtgaagcaggggtaggcaggagactacacacttccagagacccaggtaaaggaagctgcacatccagagagacatttcagaaagccagcctattcctaatgggtgatactgatttttcttattctcttgtggtaatgcaggtatgccagacttcaggaatgggacaacttttacaaattttccaatagagctaaaaatcttttgccaagaagaaccatgacacttacttaytatgacggaatwtctaggtacatggaggggcaagttcttcaccttcaaaaacaaatcaaagaacagtcagagaatgcccaagccagtggggaggagctactcaaggtraggcctattctccagtttccagtataaaatatgccttaaatrgatctctgtctacttcctgtgctaattattttctcattatagaattcatatatttttataatagaagtttttgaaggcacttccccaaagtaagaaagaaaatataaattgcccataaccttactactcagagataagtactttttgtatattgagatcccacttttcaagtatttttctgtgtgtgtgcatgcacatttctctattttgtaatttgctattaaatatattaygaataatttcctgtcattaaattgtttttcacatcacgatttaaaaggaagcatggtactttatcttacagatatatgattgtatggcctaattattattggatagaacttttctgtatgattttattgctattgctgtgataaagcatcctggtagacaaatcattccacacgacaatttaaaaaattcaaatatgtattaagcatattaatacaagagtgctggggcgcaagagtgagcaaattaaacacctccaagagtttacaacctggcatgggcaagcccccaagagaataaagggctaaatctctggtgttgggttgacacgtttgccttgttcttgtaaacactgagcacaggtgtactagttttctattgctctgtcactcattaccacaaagtaaacagcttaaaacaacacccacttcttaacagagcctccctttgtcacccaggctggagtgcagtggcgcaatctcractcactgcaacctccgcctcccgggttcaaacaattctcgtacctcagcctcccragtagctgggattacaggsacrtgccaccatgcctggctaatttttgtatttttagtagagatggggatttcaccacattagccaggctggtcttgaactcttgacctcaagtgatccacccacctcagccttccaaagtgctgggattacaggtgtaagccaccatgccaaggccaaaacaacaccacttcttaactcacagtttggcgggtccaaagcctgggtggtctggtctgggatctctgcttaggagatgtatttacataagtagacataattgaataattgaacacattgttgctgttattttgaacaaactgtcatcttttagaataagaaaaggaaaatttttattttacctccacttactccttcttcaatgctttctttctttatgtagatctaagtttctgaactacatattttccttctctctaaagaatttctttaacatttcttgcaagtcagagctattagcaacaacttccttcaattttagtttgagaagtctttattttgtcttcaattttgaaggataatttcactgggtaaagaattctagggatttttttcctgtcaacaggtcatggcactgtcttcttgcttgcatggtttctgaggaaaagtgaaaggcaattctttttttgttgttgttcctttatagaagtcccttgggcttctttaaaactttttgtttttctcttttttttgaaatggagtctcactctgtcacccaggctggagtgcagtggcgtgatcttgactcactgcaacctccacctcctgggttcaagcaattctcctgccacagactcctgagtagctgggattacargtgcccgccamcatgcctgactaatttttgtatttttagtaaagacagggtttcaccatgttggccagkctggtcttgaactcctgacctcaagtgacctgcccacctctgcctcccaaagtgctgggattacaggtgtgaaccaccrtgcctgacctaaaattttttatctttgattttctgtagtttacaaattatatgcctatgtgttggggttttggggcatatatcctacatggtgttctgcgagcttcctggatctgtggtttggtgtttgaccttaatttggaaaacatttcagtctttcttgcttcaagtatttctgatgttactttcctctttcttctccttctgatatttctattatgcatctagtataccttttgtacttatcccrcaatccttggatattctgttatggtttttcttttctagtctttgctctcttagcttgtcagttttgtaggtttctattgatatgctcttgaactcagagattctttcctcagcggggtcctgtctactaataagcctgtcaaaggcattcttcatttctctcacagtgtttttgatctctagcatttattttttgttcttaggatttccatctctctgcttatattgctcttacatgctctctactttattcattagagcttttagcatattaatcatagttattttaaattcccagtctgataatttcaacatccctgtcatgtctgcttctgacttgtgttttcaaactatgtttttgccttttagtatgccttgtaatttttcttgatagccagatatgatgtatcaggtaaaaagactttgtctaaataagtctttagtaatgtgatggtaaggtgtgaggagagggaaagcattctacagtcctatgattaggtctcagtcttttagtgagcctattcctctggactaagaacttcacaagtgcttttcagtcccctcttccttaggtgggacataatggctagaactgggtttagttgggtattcctcttccccaagatcagttagactctagtaaaacccctggaggttaggctctggttacatagtttctcctgagggcacaccttgtttagaaaaacggagtactctggcatatttcaaaatggttccttttcctcttcctctgctgaaagaatgagagattttttttcctccaatatttactgagagatcctggttgagcttctggaggtaaaacacacaaaactgtgggggctcacctgaaggtgtttggggkttttttttgtctaatttttgttgttgttgttgttggagacagagtctcactctgtcgcccaggctggagtgcratggyrtgatctcggctcactgcaacctccgtctcctaggttcaagtgattctcgtgcctcadcytcccgagtagctggrattacaggcacccgccrtcatgcctggctaatttttgtatttttgtagagatggggtttcaccatgttggccaggctggtcctgaactcctgacctcaggtgatccgaccacctcggcctcccaaagtgctgggattacaggcatgagcccacgtgtggcctaatttttttttattgtgatccaaatacacatagcataaaacttaacattttaatcatgtttaagtatgcagttcagtggtatgaaatacatttctaatgttgtgtatccatgtctgccctccatctccataactctcttcatcttgtcaaacaacaactctatacccattaagtgtatgtttgttatatttagttggtttattgtgttgtctaagtcctctgtgtcttatcttttgtataattgttctatccattattgactgttagtgaagtctccaactactattatagaactgtctatttctacctttaattttgtcagtttttgcttcatatatattgacgatcttattrgatgcataaatgtttataattgttatatttttattttaaaaatataattataaaacaaatgtttataattgttatatatattttgctgtatttaaatttttattaatatattattctttgcctcttgtaagtttctttctgatttaaagtttattttgtctgacattagtatagccacctttattctctttgggttactatttgtataaagtatctttttctatcttcactttccatttatttgtgtctttggatctaaagtgagtctcttttagtatgtaattagatcatgtttttaaaaaatccattctgccaacttgtttttttgttgagagtttaattcaatttaaagtaattactgataaagagggacttgtgtgtatcattttgctatttgttttcaatatgccttacagctttttcattcctcatttcctgaactagtgtcttattttgcatttaatttttcatagtggaacatttaagttctttccccattttcttttgtatatattctatagctattttccttatggttaccatgaggattacatttagcatcctaaagttaacttcagtaatgcacaaagaactccactcctttaatagcttcccacccctttcagttgttgatgtcacagaattacatttttgtacattatatgccccaaaacataaatgaataattattttaaatgatcagtctcttcaattatgtagaaaacaaactgtggagttacaacccaaagttacaatactactagcttttgggctactaaattttaaaaacgtattaatctcttaaaaaygtagaaaacaaaacaagttacaaactgttattacaataacacttaattgtccatgtatttacctttgttgagatctttatttcttcttagagctttgactgtcctttcattttaccctacagggctcctttaggtatttcttgtctttctttcttttcttttctttcttttttttaaggcgtgggcattttttggaagaaagtcctggtggtaattaactttgtttttgattgtctgggaatgtcttaatttctcccttatcttcgaaggacgcttttgctgaatagaagactcttggttgacgggtttttttttgtttttttaatattttgaatgtattggcccactgccttctgacctctaaattttcagatgagaaatctgctcatgatcttattgaagatgtcttgtatgtgattagttgcttctctcactgctttcaagttttgtgtctttcacttttcaaaagtgattatatttgtctcagtgtgtatctctttaagtttatcttacttggagtttgttgagcttcttggatgtttatattcatgtcttttatcaaatttggaaagtttttaaccattatttcttcaaatattmtttctagtcctttctctctctcttcttcttcagggacttccacaatgcatttattggttcacttcttggtgttccacaagtcccttaggctctgttaacttttcttcaatcttttttctttctgttcatcagactcaataatttccattgtcttatcttcaagtctgctccctgtttaattctgcctttgaatccctctagtgatttttttaaattttagttattgcagttttcacctccagaatttctttttggtatatttttaggttttctgtcactttactgttatttccattattttcatacatcaattacttgactttatccacattttcctttagttctttgattatctttagagttgtttaaaaatctttgtgtaggatatctgccattaggtctttttcagggacagtttctcttgatattttttcccccttgggatgagccatgctttcctgtttcttggtatgcctttttgttgttattattggaaactagacctttgaatctaataatatcacagctctggatatcaaattctccctcttccccagggttttctgggttttgttgttgtttttgttttttattgttgtaggctgtctctatgccaaggatcagcctgaggtgcaaacttaaggtcttcccagatcttttctgagcctgtgcctttccctaggcatgcacagtcactttctrattttccttttakaggcagttgcttttgaatgtcctagtatttaatgtctggctgtcaaggtggtggagggtgggtggagaaaaaaataaagttgggggaggaaagggcaatagccctttaaatccactggaagtcacttcaactggagtgggaggggcttgcaatgactgcctacctcttccatcagaagcagcaattggtgatcagagcacagatccctgatatctcagacagggtcctttttgcccacccttgttcccacaagttgtacgcaggttcttcaggagcatgtgcacaacaactgtctgccacaggttttgaggctgggggacaggcagctgtgctaagagctgaaactgaaattaacctcagtttaccatccaagccttcctctggtatttacaagccttcagtagactccagagttctaaaatagttacattctgacagattctgccagtgtaatgatagtctaggtggggctacagatagttggtacttcctactctgccgtctctccagaatcctcttctccctagagtttttaactcccagaccggtccagtctgagtttctagcaattcatcaattacagttcaggtttttctagcctggcactggttcccacagtggtttccacttgtgagtctccatctgtttgtctctccagtcttaggggcagcagtttgccctgtgttctcacttctcttatggatccaagaatagttgttgatcttccagtctgttcagctttatttatttatttatttttgagatggagtctcactctgtcrcaaggctggagtgcagtggcacgatctcrgctcactgcaacctctgcctcccyggttcaagyrattctcctgcctcagcctyctgagtagctgggactacaggcgtgcacgaccatgcctggctaatttttgtatttttagtagagacggagtttcaycatgttggccaggatggtcttgatctcttgaccttgtgatccacccacctcggcctcccaaagtgctgrgattataggcatgagccactgygcccagcctgttcagctttttacttgtttctaggaccaagtggttatttccaagctccttacatgcagaaatggccaattttttttcctaatttttcaacaattaacttgtactgccttaataatcataataatcaaaataattttttaaaaaaagttattgcagagaagtaatgatgggatctctcaggtcaattcctgatctcagtggaccatggtggctactctgcctgacatttattgtcttatctccaatacctactgtgtatgtctctataatgtattttctcacttgattgcttaaatccttgaaatgttcccaaatcatctgtgaaggaaataacttacagtcaaggacccctgtttaattctaatatactgttgtgggttttttttctttagaacttggagaatctggtggctcaaaataccactggccctgtcttttgcccaaggctctaccacctgatggcttacgtctgtatattaatgggagatgggcagaaatgtggcctcttcctgaacacagccttgcggctctctgaaacacaggggaatatactggagaaaygctggctgaacatgaacaaagtatgtatcatcagctagcaaaccggggtggcgatgctcacccatataaagaagcccagaagcctactgcctggttaggtttcaccaggctgccattaacaaaatatcttagactgggtcattgatgaacaatagaaacctactgctcagttttggaagctggaagtccaagatcaaggctctggagattcgctgtctggtgagggtccgttcctcacagatggtgccttttgctgtgtcctcacatgtcaaaaggatggaaaaagaaaatttgctccctccagcccttttatgagggcagagccctcatgacctaattaccttccaaaggcccaactcttaataccattaccttgggggttaattttcaacatatgaatttcaggagatgccaacattcagaccatagcagtcaccataggcctttctggattcttaccagaaagggtgacatgtccatagttcaggattgtgagcttcctcttcccctttaagttctcatggtctctctccctcatccaaatcccccttagcatgccctctctctgcccttctttgtggccactttccactttgtgttacatctgtctgcgtgtctttcctctccttgagaatgtgaactctttgaaagcaaaaaccacacttagtgcctagcacagagccctatactcagttttgttgaataagtgaatgaatgtatgagtatatgtgtgtatttaaagagggctgtgtcagtatcctagtttggacagcaagattcgtttttktctatgggttcacatggtttttaccaaagatgttttgccttgtttgatattggactaaccttgattacaaaagtcaagaagcactaatgatttctttgttctgtttctttcctctcaggaatcatggtactcaacctctgagttaaaagaagaccaatggcttcagacgatcttgagtctcccatcatgggaaaaaatygtagcaggcagggtaaacattcaggatcttcaaaaaaacaaattcctgatgagagctaataccgtggacaatcatttctaacatgtcaaagaaaaaagattttaataagcactatgtccttgtgattatctattattgacctttctccgtggytggcccactccaggttcctacataatctcttctgttccagacacagaaacagacatgttgatttcttctctttctggagggcctacaagggtcaggagtgtcatgrtttacttcttcctaatgttacaaaaaattgcttttaccattcatgttgttttagcttgacctgtttatttcagcccatgcaaaactgtatcatattacaaattattaatctcaagatggtatgacatcgtgtgttgcaaaagacatgtttctagttagtatgttaactgaaaatacttatttttaaatgtccaattgttaagtcttttggaggtagcacaatattacaaatagcaaacatttgtcatggtctacaaagacagaattagaaaagatacatgtttgtagggcctgactgcagcttccaaagccagggtgatgtcttagcccctctaaccacatgcatcaaatatcaaataaaattttaatatcagataaatatgtttaatataaaataaagatcaagttttaaaaattaaaatattaataatttttacacgggtatcttttacatatttagagtttacatgtttttttatatttaagaaataacattcattcttcatcatttcccagatgcaaaagcaaggctgtgcattttttctcctaatcacataactgagttccacaaacgaggttggacagacccagatgataccacgaggttaaccacagaggcctgatggcctggcatggagggaagagctccaagctaagaaatcagaacattaggttctaacatgagctctgccataagcacactttattcctgtctgatacatacaccctgcctgatccacataacttccctatgttagtgtacatttgtgaatactgaataagatagtgaaagttaaaaagtgttgaaaattacaatgtgccatacaaataaaaacaaactaatattagatgactgattttaaaataaacacatcaaatactaaacttcaattaagtattgtccccttcaaaactgtcatcctggaagctgcatgcttgccccatgctgcaatatagaaatcccttgctttctagttgccttattttgtactttattcattctctcacttattcaccccactacaattttccaactcattactgtatactaatccctgactaagtactggaggttaagatataaaaacatgaagggcacaattcttgacctcagcaagctcacatgtccaatagaaaaaacagatgcacgtgtaaacctcactgagcccattctactgtaatataatagagctgtgttcaaatccttcatggtggaaggagtgacacatacaaaacctggacatcttgaagactcagcggaacagcctctgattcatttcgactgcattgtcataataagctaatgccttaatcataacaattccttacatttgtacaactctttatagatacagagagttctgggacctgctcttatcttctccctgtaaaccctgaatggtgagaatggcagatgctttggcttgcctgagatcatctggccagtaagtggctgaactggagcctaagtccagaaattgtgtgcccttgtcgaagcatattcaagtccactttttctggctctctgtctgtgcaaaccatcaggaaacagtgttttctgtcttaaaaatcgctttgaccatctaaagattcaagttccctttagcttccaaaaaatggacctagttctactctttggaatcatacagaataaatttaaacttgttcctcactgaccccttcaaactcttgaacacacctctcatggttctcttgagccttctacaagctaaatatctccggttgcttctgcttctcctaccagctccttgttttcggttccctcagtatcctgatcacttgtctccgaatatattcaaatttatctccatttctcttatatatgagctatagattggccaatctggaataggagaggactcttacttcttttgttctacctagaagagtcctattaaaaccacttatgcgccttcacttttttggaagccagttttggagtcactgtggacatattccaattatctggaagataatcccaagttggctacttactctctgtgccttagtttcctcatctgtaagtggaaataatagttgtacatactgcatggagttgtgtggggttcttttttttgagaattacatgaaaaacactgcctagggctgggcgcagtggctcacaacaataatttcagcactttgggaggctgaggcaggtggattgcttgagctcaggagttcaaggccaggctgggcaacacgactaaaccctgtctcgaccaaaaaaaaaaaaaatgcaaaagttaactgggtgtggtggcaagcgcctatagtcccagctacttgggaggtggaggtgggaggattgcttgaacctgggagacggaggttgcagtgatcagagatcatgccagtgcactccagcctgggcaacagacaagagtcagaccatctcaaaaaacaatttttccctctccctctccgtctccttctccctccccctctccccctctccccctctccctctcccttctttcttcggtctccctctgttgccaaggctggactgtactgccgtgatctcagctcgctgcaacctccccgcctcgggctcccgtgattcttctgcctaggcctgctgagtgcctggggttgcaggcacgcgctgccatgcctgactggtttttgtatttttggtggagatggggttttgccatgttgaccgggctggtctccagctcctgacctggagtgatctgcctgccttggcctcctgaggtgctgggattgcagacagagtctcgctcactcaatgctcaatgttgcccaggctggagtgcagtggcatgatctcggctcactacaacctccacctcccagccgcctgccttggcctcccaaagtgctaagattatagcctctgcctggccgccaccccgtctaggaagtgaggagcatctctgcatggccgcccatcgtctgggatgtgaggagccccactgcctggccatcccatctgggaagtgaggagcgcctctgcccagcagccccgtctgggaggtgaggagcgcctctgcccggccgccaccctgtctgggaagtgaggagcgcttctgcccggctgccccgtctgggaagtggggagcgcctctgcccggccgccaccctgtctgggaagtgaggagcacctctgcccggctgccccgtctgggaagtggggagcgcctctgcccggccgccaccctgtctgggaagtgaggagcacctctgcccagccgcctcgtctgggaagtgaggagcgcctctgcctggccgctgtgcaatcttccaagtgtgaagtgacagcctttctgcacgtgtacccaacagctccgaagagacaacgaccatcgagaacgggccatgatgacgatggtggttttgtcgaatagaaaagggggaaatgtggggaaaagaaagagagatcagattgttattgtgtctgtgtagaaagaagtagacataggagactccattttgttctgtactaagaaaaattcttctgccttgggatgctgttaatctataaccttacccccaaccccgtgctctctgaaacatgtgctgtgtcaactcagggttaaatggattaagggcggtgcaagatgtgctttgttaaacagatgcttgaaggcagcatgctccttaagagtcatcaccactccctaatctcaagtacccagggacacaaacactgtggaaggccgcagggacctctgcctaggaaaaccagagacctttgttcacgtgtttatctgctgaccttctctccactattatcctatgaccctgccacatccccctctccaagaaacacccaagaacgatcaataaatactaaaaaaaaaacaaaaacaaaaaccaaaaaaacaatttttttaacttaaaaaaacctgctgcctagtatacagaaggagatccataagcattagcctttaatactgtcacatgtattctaacaagttctccccatcctgtatttagacagtttgtttttttttactttaaagagaacagacggtacagacaggaaacaaagaaaccgactgtggtctgcttttagccagtgagagagaagtaaactaaaacatatgtctaaatgctgatgggcaaaggaaggtaggcctttgggcactctctctggatggtggcctttatctctagcctatgccttccttattgggttatactcgttccttctctttaaatatcctgcaccctgtgttaggccttcctggtggtaactgcaggcagtgatcatgataaagtcaagtcatctccttcgagtttagcatcctctggttgccactctgcattgcttgaacataggctcaggggacagtactctggggttctgccccaaccaccttagtctggtttatactcagctgcccaacagctgccaaaagcatgagtctcacccctgtgccctttgtgaactgcaggcaagtattcatgttttctgtaagtcaacaccaccaggcttccctgtgattttgattctatgggtagatagtgctaatgagtgtgaggatttctgaaactaatagttcatctcccaaattactaaaaaactaaagcataccacacacctacgagaatggccaaaatctaagacaccaaatgctggcaagggcgtggagtgacgggaactctcactcgttgctggagggaatgtgaagttgtacagccattttggaagacagtttatagtttcttacaaaaccagacatattcttaccatacaattcagcaattgtgctttttggcatgtacccaaatgaactgaaaactcatatccatacaaaaccctgcacatggacatttatagcaactgtataattacccaaacgtggaagccaccaagatgtccctcagtaagtgaatggataaactgtggtaaatctagacaatggaatgttattcagcactaaaaagaaattagctatcaagccatgaaaaaaacagagaagaaccttaaatgcacattactgagtgaaagccagtctgaaaaggccacatgctctatggttccaactatgtgaccttctggaaaaggcaaaactatggagacagtggttgccagtggggtgggaggaggagagatgaacaggaggaacctaggggagttttagggcaatgaaactattctgtacattactctgaaggaggattcacatcattatacatctgttcaaacccatagaatgtgtaacagcagagtgactcttaatgtaaactatggactttgggtcaaaatgccgtgtcagtgtgggttcatcaattgtatcacatgaactgctgtagtggggaatgctgttagcaggtgaggttgtgagtatgtaggatcaggggctatatgggaattctctacctttcattcaattttgctatgagtctaaaactgctctataaataaagtttattaattaaaaacaaacccacaaatacctaaagcatatgttgaccagctccctttccctccacagagctaggatgcctcattccccagtgcttcccctgtcctggaagtgcagtgatgagaactggtttcaaaaaaaaaaaaaaagaggagaggggaggagagatgggaaggggaggagaggggagggatggggggagggggaaggaaggagagaggagggagggggaggagaaaggagaggaggggagggaaaggggggagggaagagagaaaggaaaaagcgagaaaagaccatactgcaatttgaaggttaagttccatgtgcctgaatccagaggagcgtgcatcaggttttgcaggaaccctgtacttggttccggttctgactatgccacaaaccagttacgtgaccttgggcaagtccctttttcatcagtttcctcatctctaaactaagcgagttgtgataaaatcccttccctcctccatctggctgtgattcagcctcctaacaacagaatgggtgtgggcgaacctgctcttggccagcaggtggcagcactggctccttactgtggctgcagccaaacgaaccattcctggtcacgctctggag

SEQ ID NO: 96121 - DNA, 80475 bp, Homo sapiens
attcactgaagtcctaacccccaatgcgatggtattaggagatggggtctttgggaggtaattagatctagattaggtcaggagggtggggacctcatgatgagattattaaattttaagaagaggaaaagatgagagagctttccctctccccacatgcatacttggagataaggctgtatgtgagcctacattaagaaggctgctgtctacaagccaagaaaagagccctcaccaggaactgaatttgctagccccttgatgttagaattcccagcctccagaactgtgggaaataaatacctgtcatttaagccatcaatctgtggcaatttgtgaaagcagctcaggctaaaaagcacaaagtaaggtctatgggcttgctcttgctgttttgatgacctgccctctttactgctaagcctgagggagaggctcctaggcagcacttcaccctgtcaaaagccctacctcccaggaaggttctagtgcaggagtgtccaatcttttcacttccctgggccacattgggccacacataaaatacaccaatgatagctgatgagctaaaataaaagtcccccccaaaatctttttattattattattattattattattattattattattattatactttaagttttagggtacatgtgcacaatgtgcaggttagttacataagtatacatgtgccatgctagtgcactgcccccactaactcgtcatctagcattaggtatatctcccaatgctatccctcccccttccccccaccccacaacagtccccagagtgtgatgttccccttcctgtgtccatgtgttctcattgttcaattcccacctatgagtgagaatatgtggtgtttggttttttgttcttgccatagtttactgagaatgatgatttccaatttcatccatgtccctacaaaggacatgaactcatcattttttatggctgcatagtattccatggtgtatatgtgccacattttcttaatccagtctatcattgttggacatttgggttggttccaagtctttgctattgtgaatagtgccgcaataaacatatgtctgcatgtgtctttatagcagcatgatttatagtcctttgggtatatacccagtaatgggatggctgggtcaaatggtatttctagttctagatccctgaggaatcgccacactgacttccacaatggttgaactagttgacagtcccaccaacagtgtaaaagtgttcctatttctccacatcctctccagcacctgttgtttcctgactttttaatgattgccattctaactggtgtgagatgatatctcattgtggttttgatttgcatttctctgatgaccagtgatggtaaccattttttcatgtgtcttttggctgcataaatgtcttcttttgagaagtgtctgttcatgtccttcgcccactttttgatggggttgtttgtttttttcttgtcaatttgtttgagttcattgtagattctggatattagccctttgtcagatgagtaggttgcgaaaattttctcccattttgtaggttgcccgttcactctgatggtagtttcttttgctgtgcagaagctctttagtttaattagatcccaaatgtctattttgtcttttgttgccattgcttttggtgttttagacatgaagtccttgcccatgcctatgtcctgaatggtaatgcctaggttttctcctagggtttttatggttttaggtctaacgtttaagtctttaatccatcttgaattaatttttgtataaggtataaggaaaggatccagtttcagctttctacatatggctagccaattttcccagcaccatttattaaatagggaatcctttccccattgcttgtttttctcaggtttgtcaaagatcagatagttgtagatatgcggcgttatttctgagcgctctgttctgttccattgatctatatctctgttttggtaccagcaccatgctgttttggttactgtagccttgtagtatagtttgaagtcaggtagtgtgatgcctccagctttgttcttttggcttaggattgacttggtgatgcaggctcttttttggttccatatgaactttaaagtagtattttccaattctgtgaagaaagtcattggtagcttgatggggatggcattgaatctataaattaccttggacagtatggccattttcacaatattgattcttcctacccatgagcatggaatgttcttccatttgtttgtatcctcttttatttccttgagcagtggtttgtagttctccttgaagaggtccttcacatcccttgtaagttggattcctaggtattttattctctttgaagcaattgtgaatgggagttcactcatgatttggctctctgtttgtctgttgttggtgtataagaatgcttgtgatttttgtacattgattttgtatcctgagactttgctgaagttgcttatcagcttaaggagattttgggctgagacaatactggcaaaccgaatccagcagcacatcaaaaaccttatccaccatgatcaagtgggcttcatccctgggatgcaaggctggttcaatatatgcaaatcaattaatgtaatccagtatataaacagaaccaaagacaaaaaccacgtgattatctcaatagatgcagaaaaggcctttgacaaaattcaacaacccttcatgctaaaaactctcaataaattaggtattgatgggacgtatttcaaaataataagagctatctatgacaaacccacagccaatatcatactgaatgggcaaaaactggaagcattccctttgaacactggcacaagacagggatgccctctctcaccactcctattcaacatagtgttggaagttctggccagggcaattaggcaggagaagggtattcaattaggaaaagaggaagtcaaattgtccctgtttgcagacgacatgattgtatatctagaaaaccccaaaatcttataatattttaagaaagtttactgatttgtgttgagctgcattcaaagccatcctgggccacatgcagcccatgcgctgcaggctggacaagctcggtctagtgaattccaccattacacctctctcatgatctctttctgtgtctttgatagccttcacagctccctatgtgggttcatctgtccactctgagccctttctgtgcaaactaacccactcttattgggagctgacatctgctgtcaaaagacaaaattacaacaaatttaaagatcctaaatggattttatctgtgattctagaattggacaacaccttattctgtacaaaagaaggagtgttccaatgatctgagcaaaggatgtataaccacccgacaggttcaccttgcccactgcctagacagagccaatttatcaagacagggggactgcaatagagaatgagtaattcacacagagccagctgtgtaggagaccagagttttattattactcaaatcagtctcccagagcatttgggaatcagagtttttaagaataatttggtgggtgggtggaggccagtgagttgggagtgctgattggttgggtcggaaatgaactcataggaatttgaagctatcttcttgtgctgagtcagttcctgggtgggggccacaagatcagatgagccagtttatggagctgggtggtaccagctgatccatcaagtgcagggtctctaaaatatctcaagcactgatcttaggttttacaatagtgatgttatccccaggagcaatttggtgatggtcagaatcttgtagtctccagctgcatgactcctaaaccttaatttctaatcttgtggctaatttgttagtcctacaaaggcagtctagtcacaggcaagaaggagatttgttttgggaaagagctgttatcatctttgttttaaactatgaagtaagttcctcccaaagttagttctgcctatgcccatgaataagcaatgacagcttggaggctagaagcaagatggaattggttaagtcagatctctttcactgtctcagttataattttgcaatggcagtttcattaggccacgttaactaacttctctacacctcagtttctcactctgtaaaatgaagatggtaagttatacgaagttcaaagtgagtttatactggtagacatcagaatagtgattgccttgggagtttaggaagggtcatgaaggaaacttctggagtggtggaaatattctgttttgatctcagtgtttatatgggtatatacatacattttaaaaaagtcattggccaggcacggtgactcacgcctgtaatcccagcactttgggaggctgaggcaggtggatcacatgaggtcggagttcgagaccagcctgaccaacatggtgaaaccccatctctactaaaaatacaaaattagagccatacgcagtggctcacgcttgtaatcccagcactttgagaggacgaggcaggcggaacacctgaggtcgggagttcaagaccagcctaacaaacatggagaaacctcgtctctactaaaaatacaaaattagctgggcgtggtggcggatgcctgtaatctcagctactcgggaggctgaggcaggagaatcacttgaacccagaaggcagaggtttcaatgagctgagatcacgccattgcactccagcctgggcaacaagagtgaaactccgtttcaaaaaaaaaaaaaattagctgggtgcggtggtgtgcgcctgtaatcccagctacatgggaggctgaggcagaagaatcagttgaaccagggaggtggaggttgcagtgaccggagatcacgccactgcactccagcctgggtgacaggagtgaaactctgtcaaaaaaaaaaaaaagtcatcaagcagttaagattagattaaaatgcagtaatctaatcttaattagattagatacttagatacctttatttaaaattttttaaaagtggagataatagtacctacttcccagcatcattgtgacgattaaatgtgctcagcaggttgcataattgtttctgatctagctagtatccagtatttgtctattgtcacaggtggtgactgctggaggggctgagtccccaataagctgtgaatgtcttggaggacaagtatgttggccccttcttgttctagcagtgaagaggatcccatgtagactccaagcagctcaagttcagcaagggagacagaccattgcaagtgcatgaaaagggcactggtgggctgggaagttcgtaggaggagcctctcacatgctgggtttggggaggaattctggaaagcagttagtcttagggacgggaaggatgtagctggtgggacgggcgccctcagctccatgaataaaaggagtgggtctgactctggttctcattcccctttaccatgcctggcacacattagaccatcaataccaattgactccaggaaggagtgtctccccgtgggggcatcaggagccgctgagtttaaatacacaggtgggatgtgacacactgggaaccattcagatttgctggatctggatagggcttgtcaggactcagtgcttccaaccccagggcccatttccctgtggcccctgagtcaccaccatgggtggacagctgctccagtgccaagatacagccacagaggactgcaggcccagggcctccagaaggacaggcaggctccctctgaaagacaagcctgcttatagctgaaacctctggcccaggcgtcctctaagggaagccaggctgtgtcagggcacggcccatgaagacataagatgaagatggggagaaccagagggggtgcgcttcgaaggaaagcgggctgcgtgggggcaccgtcgattgcacaggacgcggtcccggctcgcgtagccccgcaggcggcgccagagcgcargcccgcctcgtgactccggtccacagtccggccgggcggagctaggggcgggcccctgcgtctctgggcgctggagcgcggcgactatcacgccgcgtggcggacggacggactgacggacgcgcagccttacccgaaaggccatggcggagcacgcccctcgccgctgctgcctgggctgggacttcagcacgcagcaggtacagtcgcctggccgcagggccacggggccgcctcctccgcttcggtgggggtagggggcgggctgtcacccggacgcgggaaaacatgggcccggccgcgggcgcgcctacctctcgggcttcccggggcccccgcgcccctgccctgcgcgcggccgtggggcgccggtgccctcgcccggagatgccctgccaatgccacccgctygcaagatgcggcctsgaccccgcctggacccagctaccccaggaaactgcaggcgctcctcggcaggacccccggtgcccagaggggccggaggactcggcgggttcctgcgctgttctgggcacccagtgacggggatccgaaggaagtcagctactgtaaggcaggggaacagacaggcgggtagccctgcgcacatgcacaaccagtgacctggaagcagattatagcccaaaaccytttttwaaaaattgaaatggcccaggcctggtggctcttgccggtaatcccagcactttgggaggccgaggcgagtggatcgcttgagcccaggagttcgagaccagcctgggcaatatggagaaaccccggtctctaccagaaaatacaaaaattagccgggcatggtggagcacacctgtagtcccagtttttctggaggctgaagcggatcgcttgagcccaggaggtggagattgcagtgagctaagatggcgtcaccgctctccagcctgggcgacagaacgggaccctgtctcaaaaaaaaaaaaagaaaaaagtgaaatgcatagtgtacaagtggactttaccctgtgaccgcccttcgttgacaccagcttgcctggtctgtgcacccaggactgctggccagaggagcagtgtgctgctgccaacgcccygcagacaggcaagcaaatcaaaatttgccttcaaagagggcatggggtgaccgggggcaccttttcctttaaagtacttgggaaatatacacagttgcagtcaaacccctcttctcgaatgggtcaagggaggcaggcctctggccagtccttgggggaacgtcctgtgggactctggatgactcgagttgccttgctggacctcagttttcccatctgtccargaaaggagttatactcccaagcttggagattgcttcagtgggacattaatgtctctggaccacaatcatggcctgtgagaatagcccatggccttgcctggtctcaggcctctgcagacatggatccccagagatgcctccaaaccttgcttcccattccttcctctctggcactttctcccgcctccttgtcaggtgcacgaaccaactcatctgtgaacatcttcctctagagggtcttggctttggctatttggggaacaaagattccttgagacatgtgggtgttcctacttagcctcagtttcttcatttkactaaatctttgagtgttaccccagatgartcctctgttaccacgattacggtgaggcagccctgccttcaaggaggtctctaggttgaactgctcctagggtgtggggcctcatctggtgacgttagtaccccctggaccagtgtagaagctgaggaaaattctacacttcmttttttaaaatgcctttcaggtaaaggttgttgctgttgatgcagagttgaatgtcttctatgaggaaagtgtgcattttgacagagatcttccagaatttgggyatgtacttgatgtgcatgtgtgtgtgatgggggtgttggttttggggtcctcccgcaaacttttgtattcgcagaccgcactgttgaggctttgccaaatacaggagtggtggtctcggcagacctttcaagcatctttttttcctatacctagagtgccatctcccccatttcttcctaattccattcatccattcatgaagtaagcatcagttgagacctactttgtgccaggtgctaggacctgatggcgaaacaaaaagagaaagctctcccagagcttcccactgagtagtggagactggtatcaaacaaagaatctcacaaaagagtgtttcattataaactctgagaaggcctctgaaggaaaggaactcacttctccaagtgcttattataaaggaatgtgactcagacttgggaggggaagtcccagagcgtctctagggaagtggtgcttaagctagagatcagagtgagtgaagttagccaagcgatggaagggaagttggccaggtgatggaagagcattccaggcagaaggaacaacatgtgcgagggccctgtggcaagaaagagcatggttcattccttcatgcaattgaagaaagccaatgatgctggggagcagagagaggcggaggctggtcagagctccataggccatggtatagagtttgtctttattctaaaagctatggtcagccactaagggccataaggggtaggggtatgggtgaggtatgaatgacaggttgyatttttgttttgaaaatatctctctgggggcattgggagaacagattcggagcattgctggaatggacgtggggaactattaaagaggtttttgctggtcattcaggtatgaaatgatggataggagagagctgagtagtaaaatggacaggtcctgttacaaaattgaatgtgagatgtaagggtgggatttctggctgtccttcagagtggatgttggactgtgggaaagaatgagttttggagagaaagatcatgagttcagcttgggctgccataacaaggtaccatagactgggtgggttaaagagcggaaatttatattctcacacatctggccgttaggagtctaaaatcaaagtgctgggaagattggtctcctctgggacctctctccttggcttgcaggtgaccactctcttgctgtgtcttcacatggtggtcactcggtgcaggagtgcttggtgtctstgtcatctgtatcctaatcttcttataaggacatgagtcatactggattaaggcccattctaatgacttcattttaacttaattgcctttttaaaggccctgtctccaaataatcacaatccaaggmcctcggggttaggatttcagcatatgagttttaggggcagagggggcacaattcagtccgtaacactgtggacttgctggttttgaggcaccctcgtgagggcctggtaaaagtgtccttccctgtctgttttagacacacttcctctttgaagccttcccagctgaccctttgtgcacctctcattacccatcacattgtgttgccaactctttgcccccagctaatgcggccccatggagccgaggttagaagccatcttgctttctcacattttttattattgcaggccttgcatgtttgcctttgggtagttggtatgtttcaaggaattggtcttttcaactaagccatcaaatgtgtggccatagtgttgttcataatattcctttatcctccttatgacatctgtgggaccagtaatgatgatctcttgctgttggtcatttctgatattggtaatttgtcttctctctttttttctttggttatcctggctagaggtttatcaattgtattgatcttttcaaagttcaacttttggttttgttgattttcccctgttgttttcttcaagttgtgctctaatttttattacttagtttcttctgcttgctttaggtttaaattgctcttttttccctagtttcctcaagtggaaacttagaggattgatttaagaccttcttttctaatatatgcatttaatgctataaatttctctgtaarcacaaatgctttttatgggatgccttagcagcatcccatacattttgataagttatagtttcatttttttcgttcaaaatattttttagttctcttgagacttctttgactcatgggttatttagaagaatgtttttaggctgggtacagtggctcacacctgtaatcccagcactttgggaggctgaagcaggcagaacacttaaggtctggagtttgagaccagcctggccaacatggtgaaaccctgtttctactaaaaatacaaaaaaattagctggacgtggtggcaggcatggtgacaggcmccgtgtatgctgcacgcctgtaatcctagctagctgggaggctgaggcaggagaattgcttgaactgtggagagggaggtttcggtgagccaagatcgcgccmctgcactccagcctggacaacagagggagagcctgtctcaaaaaaaaaaaaaaaaaaaaaaaaaaaaggaagtctggaagtgtgttgtttaatctccagattttccagttttctgttattgatttctagtttaatttcattgtggtctgagaacataccctatatgacttctagtctttcaaaattttaaaatttcctctccctcactctctcttccatttaataagtcagtcctctccactggacatttaaaaaaaggtgtccataaccaaaatatggtattgcttttttccattatattttcaagatattttaaaccagatgcctatagatttagttcattccttccccatcacctcaattgcattgtgggttttctttttacaactttattaaggtataactgatgtacaatactgtgcatatttggagtatacagttaaaagctttaatatctgtattctttcatgaaactatcaccaaaataagacaatgagtatttccatgtcctaaaaatttcctcctgcctctttgcaagcgatgcctccttccccatacccctacccactggcaaccgctgatgtgttttctatcactagtttgtattttctagaattttgtatagatggaatcataattatgtatgcttttttaaaacctttaaaattttacatcacagttttgagattcatccatgttgctacatgtggcaatagttggttcctattattgccgagtagtatttcattgtatgatgttgtatggatggactacaattggtttcacctgatgagggatattggggttgtttctcttttctgttgttataagcaaagggctatgagagtcacatacaagtcttttcgtggacatatgatttcatttttcttggaaatgacataccaggagtacagtggctgagttatacggcaggtatatgtttaacttcttaaggaattctcttccaaagtggtgattttaagaaaaaaaattttatattgttaacaggcattacattgcacttaatatgtaactcaaatgaaaagtatacagtgaaaagtctttttttttctttttttctttcttttttwgagacagagtctggctctgtcgcgcaggctggagtgcagtggcacgatctcggctcactgcaagttccgcctcccgggttgtcctccattaggaaatggtacatctacacaatggaatactacacatctataaaaaagaacacagaagtttttatgtattgacatgtaaacacagccacgttactgtgaagtgagtaaagcaaagtacagatcagtgagtatagtatgctttctcttgtatgaaaggaggaaaatcagaatattcataccttcctatatttccatgtaaaaacactggaaggagcctggcacagtggctcaagcctgtaatcctagcactttgggaggctgaagcgggtggattgcttgagtccaggagttcaagaccagcctaggcaatatggtgataccctgtctctaccacaaaagtgcaaaaattagtcatgtgtggtggcgtgcacctctagtcccagctacacaggaggctgaggtgggaggatcacttgagtccagaaggtggaggatacaatgagccaagatcataccactgtactccagtttgagggacagagccataccttgtctaaaaagtaaaaaaaaaaactagaaggatacacaacaaattaaagtcatctgtagagaagggacggagaggagagatgagctcacaggtgggattaagacttttcactgttatatggggtttcaccatgttagccaggatggtctccatctcccaacctcgtgatctgcctgcctcagcctcccaaagtgctgagattacaggcgtgagccaccacacctggccaagttgtcgctattattgccacrcacagatatttatgtcattgaatttcccagtctcttttattgcttctagattttgagtcatagttcaaaaggccttcctcactccaaaattatgaaggaactcacctatgtttttatctagttcttgtaagatttcagctttcttacataaaaatatttggagtttatccaggtacgtagtatgacatwtgtatccaactttaatttttcccagatgattcttcagttgttgtaacaccaaccatgtttktatttaatttattttttttatttgagacaggagckggctgtcacccaagctggagtgcaktggtgtgattcagctcactgctatctatgcctcccgggctcragcaatcctccctccttagcctcccaagtagctggaaccacaggtgcgcccctaccatgaccagctaatttttttgtattttttttgtagagatggggtctcactctgttgcccaggctggtctcgaactcctgggctcaagcagtccacccacctctgcctcctaaagtgctgagattacaggcgtgaaccaccacacccagcctcaaccgggtttttagaagtccatctttacctttaagaggctgaggtgggcggattacctgaggtcaggagttcaagaccagcctggctaacatggtgaaaccctgtctgtactgaaaatacaaaaattagctgagcatggtggtgggtgcctgtagtctcagctacttgggaggctgaggcaggagaatcacctgaacctgggaggcagaggttgcagtgagctgagattgtgccactgcattccagcctgggtgacaaagtgagactccatataaaaaaaaaaaaaaaaaaagaagtccatctttacctccatgatttgagatgtgagccttatcatgtgctactttctgtgttcacttaggtccatttttgggcttttgtttttgttccatggtttggtagatctgttcataagccagtaacacattgtttcaattatcccagctctgtaatatgtttgyttgtttgtttatttacttttgagttggagtctcgctctgtcgcccaggctggagtgcagtggcatgatctcggctcactgcaacctctgcctcctgggttcaagtgattcttctgcctcagcctcctgagtaattgggattacaggcgcccgccactggctaatttttgtatttttagtagagatgggtttttgccatgttggccaggttggtctctaactcctgacctcaggtgatccgcctgccttggcctcctgaagtgctgggattacaggtgtgagccattgcacccggcctgtaatatgttttaatatctagaattgttggtcccctctgtttgtttttttttccagagtttccatggctattcttgttctttttcaatatgtacttcagaatcagcttttcaggttccagaaagccaaattgttaatttttttttttttttggacatggagtctagctctggagcccaggttgaagtgcagtggtgtgttctctgctcactgcaacctccacctcctgggttcaagcaattctcctgtctcagcctcccaagtagctgggactacaggcacataccactacacttggctaatttttgagtttttagtggagacagggtttcaccataattggtcaggctggtctggaactcctgacctcaggtgatccacccacctcggcctcccagggtgctgggattacaggcgtgagccaccacacccagcctgttgttaatatttttattgagatcatattatctttataaattaacttggcagaattgacaactttatgagattaagtcttcctgtctaagcacacgttatgactttccatttgttcaagtcttcttttgaatacttcacatgtgttttaatatgtttaacatacagcttttgctcactttggtagattgcacaaatgaccacaatactccacccatccctgtacccacaccctttgcaatgtgactgyaattcctcccatcaaggagtcgtttccctacctgttgatttgctttatccagtagaacaggggaagtggcattgtgccagttctaagcctaagcctcaagcagccttatgtgcttctgctgtcattcttggaactctgcctagccaccaaatgaacaagctcaggctatactgctggagagttggacatatgtggcctagttgccccaacttcttcccctaagagccagccagcccctagctactgttagctacctatgaagcagagccttctagctaccgttaactgactgcagatgtatgagtgagcccagctgagccccatccaatgatagcaagtagaattgtgagcttaatggtttttagccactaagttttgaagtggtttgtgacaatgcagaaattacccaatgtagataattatttttaagtttatttctaacttttttatccttttactactgtaagtggggaagggaggtttctagcagaaacttatcagctgtcttccaaactcatttccctttcttcctaggcactctcctgccttccttgtagttatgttcagccatgtgactgagttctagccagtggaatataagaaaatgtgatcaggcctctaaaagacctagtccatcaaaacctccttctctgacttttctcccatttttggctgatgtgggtgtccagagcaaccttggaagcacatgtggaacatgacagagccaccatcaacctggttcctgaatgactgcatggagcagaactccccactccccactcatgttcctaaccacctactgattgtgctttacatgaggagaaagaaacttcagctgtatcaagccatagaaatgtgtttttccttaactaatataattttttccctcatatcctttttttaaagaaaatactggggccaggtgtggtcgctcacgcctgtaatcccagcactttgggattacagaggcgggcacatcacgaggtcaggagatcgagaccatcctggctaatgcagtgaaaccccgtctctactaaaaatacaaaaatttagccaggcttggtgccgggcgcctgtartcccagctgctcrggaggctgaggcagragaatggggtgaacctgggaggcagagtttgtagtgagccgagataatgccactgcactccagcctgggtgacagagcaagactctgtctcaaaaaaaaaaaaagaaagagaaaatactgtttctattgaaatgtaattcacataccataaaattcaccttttaaaatgtacaatttgatggttttagtatattcaaagaacaatatcactatcaccactatgtaatcttagaacattttcaccacctggaaaggaaaccctgtattaattagcatccactgtatagtccccctcctgccagtagtggcaaccacaatcaactctctatctctggatttgctgattctggacatttcgtagacatgaatatatataatatgtgacagccttcttttacttagcataatgytttctttttaaaaawttttcatagctttttgyttrtttcaaataccaacttgaaccagatacctggcataatgttttcaaagttcatccatgtcatagcgtgtgtcagtacttcattcctttttgtggttcagtaatattccattgcattgatatatcagagtttgtttttccattcaacttttagacatttgagttgttctgcttttttgctattgtgagttattctgctatgaacatccacatatgttatggattgaattgtggccccccagaattcatatgttggaagcctaccctcatcatgacagtatatttggaggtgaggcctttaggtagataattaaggttaaatgaggttgtaagggtggggctctaatttgataggacctgtttccttataagaaggagagacaccagtgctatcccacttcatgcgcagatgcacagaggaaaggccttgtgagaaggcggctgtctgcaagctggaaagagagccctaaccagaaactgaatttgctggcaccttaattgtggacttctagcctccagaactgtgagaaaataaatgcctgttgtttaaaccatctagtttatggtattttgttatagcaacctgagcaaactaatacaaygtatacgtttttgtgtggacatatattttcatttctattgggtatattacctaaaagtggaattgcggggtcacatggtaactctgtgttcaacattttgaagaattgccaaactgttttccaaagkggctgtactattttccattcccaccagtggtagatggtgcctctagtttctctacatcctttttttttttttgagatggagtcttgctctgtcacccaggctggagtgcagtggcgtgatctcggctcactgcaagctccacctcctgggttcatgccattctcctgtctcagcctccctagtagctggaactacaggcacccgccaccacgcctggctaattttttgtatttttagtagagatggggtttcaccgtgttagccaggatggtctcgatctcctgaccttgtgatccgcccgcctcggcctcccaaagtgctgggattacaggcgtgagccaccgcatccttgcttaacatttattattgactgtctttttaattacagacggcagccatcctagtggatgtgaaatgcaatctcactgtgcttttgatttgcatttatctaatgataatgatgttgagtatctttgccatttgtgtatcttctttagagaaatgtctattaagatcttttgcccttttttaaaaaaaactgtgttatttctcttttattattgagttgtaaaagtttttttttaatgtatattctggaaacaagtcccttgttagatatgtgatctcaaaatttttgtcccattctgtgggttgtcttttcactttcttgatgatcctttgaagcaatgtttttarttttgataaagtctaatcttcctacttttttccttttgctatttgtgctttggtgcagtattggttaggttttggtatcaattttatatttacttcactaaaataattggaaaaattttccttcttttcaggtgctctagaacaatttaaatagtattagaaatatttgctatttaaaggtttggtcccagcactttgggaggccgaggcgggtggatcatgaggtyaggagatcgagaccatcctggctaacaaggtgaaaccccgtctctactaaaaatacaaaaaattagctgggcgcggtggcgggcgcctgtagtcccagctactcgggaggytgaggcaggagaatggcgtgaacccgggaagcggagcttgcagtgagccgagattgcgccactgcagtccgcagaccgacctgggcgacagagcaagactccgtctcaaaaaaaaaaaaaaaaaaaaaaaaaggtttggtataatttttctgtcaaaccatttgggcctggtgcttttggggcatggggtggctctggtcttccttcttagctggaaatgccagttttgttttgtgtgtgtgtgtgtgtgtgtgtgtgtgtgtgtgtgtgtgtgtgtgtgtgtgtttttgagacagarccttgctctgttgcgcccaggctggagtgcagtggcaagatctcagctcattgcatcctccgcctcctgggttcaaacaattctcccaccttagtctcccaagtagctgggattacaggtgccctccaccatgcctggctaatttttgtatttttgtagagatggggtttcaccatattggccaggttggtcttkaactcccgacttcaggtgatctgcctgccttggcctcccaaagcactgggattataggtatgagccaccgtgcccagcygaaatgccagttttaagttgttaaatacatggcagaatgtctggttacagtttttatctgttttgtgaaggcaacattttttggtgagcttttattgtctgtagtaaaattttgttgctctcttcctctttttccctagtagtatctttttaaaaaatccatattattgagtataatttatgtacaaaaaatgccatccattaaaaatgtataattaaaggtactttgccagatatagacctatagctgtgaaactaccaccacaatcaagatacagaatgtttatatcacccyccaaaagatcgcttttttccctgcttaccgagacaagctcggttgtggagactccaacgcaccagcactagaggaatgaagacaaagacccagaaataaagtgcagtgtgggaatcggctaaaagcctttagagctgagagccacaaacagagttttgcccacatatttattgacagtaagcctgtgataaacattgtttctaaagattatagattagctgaaagcattycttatgggaaacaaagcattcttttcaagaagcagagaaacaggctgtggctgattatctgcagcaggaacatgtccgtaaggcacagatcgcttatgccattgtttktggtttwggaatgccttgagtggttttccgccctggatgggccaggtgttccttgccctcattccggtaaaccagcaacctccagtgtgagtgtcatagccatcgggaacatgtcacattgctgcagaaatcctgtttatggccagtttctttaaggcctgtttrtgacaggcttagggcctgttcccagcacccactagacttagacaaccactgatctccttttctcagtatagatgaatttgcgtcttctagtctgttcctatataagttataattgtgtacatatgaatagttcatattttttcttgctctgtagtatgatatcacaaatatacaccacgatttatctgttcacttgtttagggacactgggttgactccagttaattattacaaataagtctgctatgaatatttgtgtacaaatctttctatgggcttagactttcatttctcttggctggatacttaggaattgaatggctagatcacatggttatctaatagcatcttggtgtggattctgagmctggttttctctttcctaacacatagttaaaagggttggattttatcagatcagctctttgcactagagtcttctaggggtgaggtgggtggggagagggttccagtcaaacttccaaagcctgtagtccaaggacttgttggtctgttgtgatagtagagacactcttccctccgacgcagcatctctgtgtggctgcccctcctctacctctccaaacctatggggcttgagagggattttataatccaacactgcactcccctagggtgagcctttcttatctagaaggcttctttagaagatgcttctgagaattgccacatctgggccactctgggcaatttgcctgtcttctctttccatctttgcagccctygtgcctgttcaatcaacagttcccacttggggttggggaaggttctccttcatctggacatttccagagtcatccaccatagggtttctcctggctttgcaatggtctgcctkccctgaggctctggtctacattctctgttgttcttgcaggactcagggyggtgttcatgtgcacaaggatgggctgacggtcacttctccagtactaatgtgggtccaggtaagcgcagggattcctrttctccttctatccccaggctgtctcactggcagactyggtgatttgctaggaagtccaaaggtggcagccaatgagagcatctgttgwcaccaggtcctcatgggaargtggagttggcatgactcctgggatcaggctcagcctcagctggtgtcaacactcccaggctcagaggacttacaaaaaacttccaggtactggagctacagcagatggcaagtcctgccattaaccacctttaaaataacacagagcaaatcttttccaaacatctgcagtcaggccctgtggcctcccttgtaccatgaaatatacaaacatagactgggcatggtggctcatgcctgtaatcccagcactttgggagrccgaggcaggtggatcacctgaggtcaggrgttcaagaccagcctggccaacatggtgaaaccttgtctctactaaaaatacaaaaaattagccgggcgtggtggcccatgcttgtaatcccagctactcaggaggctgaggtaggagaatcacttgaacytgggaggtggaggttgcagtgagctgagacygcaccattgcactccagcctggataacaagagtgaaactccatctcaaaaaaaaagaaaaaaragaaatacaaacatagcccttagggtcttagtgctcagcctcyaagatcccttagctccctaatcacctagaatggcaagttatggcctggccagtcagactcatatcaatgccaagccaggcctgcctgctgaggatcaacaggaaaggmgaatgcctgtagcaggatctggtgacctagggggccacaggagcagggatgtggacagcatagacaggcgtggtagctccaggggctacctcatcatatgctgcagggtccccgagtccctgaaactggaggccagctaagtgtgtgtcttccaaaagcttttttcagtcctccaatacctatctaaccaattccctatatwacattctttttgttmaaaataactggtatgatttcttttttattggtgtaaccctgattcawacamtggagaattggggtaaaggatggattttatccagataaactggstagaatgtamttcagagggggctgagccagaccaaggggcagagtgggagggtcgggggttagagacaatggtcagtgtcaggaggtcccagtgatgatgtcgagggcatctcataggccaaggccttcacctggggaggtgagcagtgggtgagaaccaggcttgggggcmgggccaaggtgatttctgatytgaygcagcctccaggaccaaacttgatcctagctctgccagcccctgctccggctgcaccccactgcctgcccaaggtttgatggrcacagatagagatggcagccacagccagggctgaaagaagccctcccagcaaaggctgggggtggtggagtcaggcaaaagtgagagagtcttctctgccctcaggaaaacacaggtcagagtgaatctctaattcctgccatgaaatcttaggagggtggtgccaagctctgctgggcaccaccatccatcccactcactgggttttgctagaaaggagggtccaaccagacagtggaggctggaataggggcctggaacaggtggccatcatctctatccactccctccagcctctggctcctggacacagggagtctgggcctgatgctttgctctcaygggagctctctcctttgctcttcacttccctgtkgcagtgaagtcagatcactaatatagagggttgaaaatgcaaataaaagaaggcaaaagttggctgccttactttgttagtttttgagacaaggtctcactgtgttgcccaggctggagtgcagtggtgtgatcatggctcactatagcctcaatctcctgggctcaggtatcctccctcctcagcctcctgagtagctgggattacaggctcatgccaccacacccagctaaatttttcattttttgtagagatgggatctcattatgttgcccacactggtcttgaactcctgagctcaagtgatcctcctgccttggcctccaaaagtgctgggattacaggtgtgaggtgatggcatgcacccgtagttccagccactygggaggctgagatggaaggatcacttgggcctgggaggttgaggctgcagtgagctgagattgcrccactccatttcagtctgggaaccagagcgagaccctgtctcgaagaaaaaaaaatggagaagtaaaatttgaggattggtggtttatgattccatttatttaaaatatttttagcatagttgacctttttatttgattgatgcctacttgttwaattaatgtactctagtgcttacaaatcccaagtcatgagtttcttcatcatctgcccagagtactctgctgtaatggcaggcacttgcgtttcaattctgaggcttgcgtgtctgattcagtggttctgtacagtcatggtgggttctgtttttcttcttaggcactggatatcatcttggagaagatgaaggcttcgggcttcgamttctctcaagtcctagccttgtccggggcgggccaggttcgtttgcagcagactctgtctgccatgtgagggtgactgtcctgggcaatggtgtgggtgttgaagagatggcaacccttggatggggagcggctcattcttgacagccactgcacaaatttcactgtgaataaaaatccctacaactattttactttggagactgtataacttgtctcgttgcaaaaggatctgagacagttcttaggagtaagtattatataaaataggacgcttggtgagagaactgagttcctctgaaggggatggaggaagcaattgacatgaatttattatgactgcttgggggcaccacaattgcttttctatttcctgaaagtaaaagcaaagtcaaaaatgatcctaataatgatagtagtttcagtagaaggaagagtattaataatgatatcagaggacattgacttagtgcatgcgcttagtgcatgccagatacaactctgaggcctttccagatgtcatccaacttaatccttatgattctacagggtggtgctgtggagtgcttggtacacactcagggcatactgtctgggtttgatccctggctctgccatttacaggcagtgacctgggatacgtcatctggctttctggkgcccccgtattctcatctgtcatagggtcattgtgagtgtaagtacatagcacagtgcctcctattaatacgcagtaaacattattaaagcttgggcttctgttattatcgttgatatttacatgaggcacggagaggtgatgtcacttacccaagatcacacagtgctgggagtgggagtcaggacctgagtctatctcatycagtcccttggctgtgctgggatcacttttctccatgctggattactrtattttcaaatcctcactaggatgtaactaatttttctgaagatgcttcttcctccatgacctaacaggaatttattgttttggttcttgttaaacacaacagagattccctgggtgatcttgtccacttctctctcccgaatcccaggcctggacacccatctccctcctagstaatccccgacccccatggctggatatcccacagatgcctcagrcttagcatgtcccagactgagttctgtctcccttcagacctcctcctttctgggttctctttctcagggaattctccccatccacccagggcacaactcaagtgtcatccctgcctcctccaccttcccaccccacatccaagggtcctcacgtcccactgatttgtctgtgactcttgactctaccatctyttctccagcgctatctgcttgtcattcttctccaggtctctaccgcagcctccttgcctccagcctaccttccccgtgactcccacaagcctttaatacattcagctctgtgcacgctgctccccctggtaatccagggttcctaccacctccaagataaaccccagcctcctgagcatggtttcaggctcagtgctcaggctgtcccctctctcttcagcccatcacccacccccgacccagcctcaggcccactgcttagaatgccactcatcccgggacttgcctggcgcccctcacctgcagattctctgcatgcaacacacactaggaccatttcctgatactcatgaccacttcctctcatctgtacccgagttggttaggtgcctctgttcccacgaccctgtcactgcagctccatagttgtacatttgtgtccttttccctgactcaactccagtagcctgaagaatagggaygaaagtatcctattcatctgtcgcaagcctggcatgatctatgtgcttaataaatgttcattgaatgaatgaatgaatgaatgaatggggtgagtgaataaataaatgaatttcaggtaatattacaagcaatgtctttaaatgcagttttacaaaaggcatyaaaatccagaccaataattagttcttggaccttttctrtaagttgtagggtagacagggcagagttcctccccattttcttgaagtggaaaccaagtcccaggagggtgatgagctctgtgactaagaagtggcaggggcaggtgtggagcccagttctttggcatgtggtctggggtctttctgtgtcttcaggaggstgtgacacyggtgtgtggtcatgtgaccatgtgcttgggtttcccaacagcaacacggaagtatatactggaaggctggagcccagcaggcactgacaagcttatcaccagacctccggctacaccagcagctkcaggtaactgtggctaygtkgtgtgagtgtgagaaacttctgcagartcccaagtcctgtgggtcctgaagcctgctcatctcagtgttgcagctgtgctcacgcgccctcaccagaagagctttcaacctcaggcttttggggagagaccccactgggccagttctaagttacagcacaaagggctggcccatgtgtctccaaccaaggtcacctgggaagaagcgtcatgactgccgtgatgggcagtgtgaccgccagccctggggcagatctccaagtcagcggatggagcttaagcctgtgcctttgccctccttcccaggactgtttctccatcagcractgcccggtgtggatggamtccagcaccacagcccagtgccgccagctggaggctgctgtgggtggtgctcaggctctcmgctgcctcacggggtcccgtgcctatgaggtaggctgaggatgcggggggtgcagggggtggtctggttgyaagctccggaggcatagtgggtgacctgcctctggggggatcacatgaggtcatggaggtgttgtrgagccagcaacaggcactctggcccctgggtcctgatccaggccacctgctgccctgtgtgttcccaggccaggctgggtgtgcacatggctgtgctcctgacatggaggtgctgtgcatgggggtgagggtaccccctcaatgagaaggcacctcctgtcattatttgtaacccggggattacaacaggacttacgttttgggtaggtttgaagctgaaagaagtcagtgcatgtaaggcacttagtgtagtgcctggcaatrttwaaaaaaaaaaaaaaaggaaaaaaaataatagtgtctctgttccacaggttcaaccttgtccccaggggtgattgtgattaggccagcttgggttacatgacctcgctggagtagaagttttggggatagggccaactctacttgggccacctgaaataacaatatgtggrtggggaaaataccccgatccctcacctggtgscttggtcagaacagtcaccgtgctgtgtgaagagcaagggttattcactcagggttgtccagtcctgatgtgggagaggccctccaggaaggcccagaagttactcacttctctatcctgtgggtgcagagccattgtttactgcctgagtatttgattactaaggacattttaaggattcaaaggccaagatcacattgttwagtagatatcaaacagatttaatgcttatttttaaaatatttaattattagaaacgaggtctcactgtgttgcccaggctggactcctgggctccagagytcctctcgcttcagcctcctgagtagctgggattacaagcgcacactactgtgcctggttggggcttacttttaaaagcttttatggtacctactcctatccagagcatgctacattaaactcactttgtggaggtaattrttcattctgtgtaggatttgggttcctaagaatttatattccttttccagcgttttacagggaaccaaattgcaaaaatttaccagcagaaccccgaggcctactcacatacrgaggytggttaaatgttcctgtttgattgaaagtcacakttgaattcttttcataatatrttagaatagatacatcttacgtgcagtgactraaaacrttgataagcagacattaacaaatgatatatttgatttgcttttttctcattgtcaggacatttccaaagaggagggraagaatggaatgtgggaaagagawgtcaggggttctcctgaccagaagggtgagggtgagggtccaggtgggagcactggggactgacgtgttcctgaggccacctgaatggaagatctgagtgtctgagcaggctgtgtctgctcactttcctatgtggttaacgcaggagggctaccaggcacatgattggcatagagtcagtrttttctttggawatgtataggactgggcatttgtgtccccagctgtggcccttcagccagagcctctgtcacaggaacccaggttcattcctggctccacagttgctgaagccagcacttgttgctgcctgagaaacagccccacgccctggctagtgattttcatcttgtgataaggaaacgatcagctcacattaaaccaaagcacctttttaatcttagaaattaacatgtggtttattatttaatgatttgaggttccagattattctgcagcattagccattaatgtaggctttgggtaraggggtgaaaaccctccctaaattctgtgtgtggaacgaagtttgcctgacagaggacaggaggtgataacattctctccacagttccaaaggcccatgattctcatgtggaagtacagacccttagggtggcattgaaaatccatcatctatttctctggctagtgctcagggtctgtggcttctgaggagccagctttcctgacgccctgaragtgtcctggttggttctgaggccacacatccacttcccttgtaaccagaaggaaatgccmaggagatagaggaaggaaatcagggcacacattccccagcatgtggattccggatggaaatgcagcttccctaagccctttctcatagggcttttggtttttgtctcttttgaacttggcagttttatggcccatcagaaactgtagaraatgaatgctctcccgaggagtctgctcatggtattccagctgctcctatctgagatgcacagtctccaccattacttgggccttttgttcaaagtttccacttccytctccaattttttttcatgctktgtgtgtgtcagaagcattcagtagcgtagggtatgtggaagtgaggcacctctcactgtttctttcctttacagagaatttctttggtcagtagctttgctgcttccctgttccttggctcttactcccctattgactacagtgatggtgagcctcggggtatggggtgggtgcctgggcagtgtgcatgtggcatgtggstgtgcaagcagtgggagccccacctaccccgagtgggtgccaatcttgtagccctgtcatctgttgccaggaaggaagtgtattcattatcttttaccacataacaaatgaccccaacacttagcagctgaagaccaccgtgtttattttctcacctagtgtctgagagtcaggaatgtgggggcagcttagcttggaggtactggttcgggatctcccacaaggtggcagtcaagctggcagccggggctgcagtcatctgaagggttgactggggctggaggatccatttccagcatcatgcacatgactacaggcaagaggcctcagttcctcacatgtggctgttagtgacactgcagagagggagggaggagacagaggccaagcagaagctgaggagtcttttataccctaatcttgaagtgatgtgccatcacttttgtctcatcttactggtcacacactaggtacggttgacccagtataatgttggggagaacctcacaaggggtgaacaccaggaggtggggatcagtaggggcgatcatggagcctggctcctgcaaggagctattaaagtttttgtttcacatttggtgaactcatgagatttgtgagcttctagaatcaaaaccccgaaaaaaataaattgcagttgatgccagtgaggagggaaagctgggaggaggttgctgcaggaacycttggatgagcctaagtgtgagaagagtgtggacagaaygggggtagagaatgcagggcaggagcccagagccrtggatatggcttcagaatggagcctgggatgctctgagcctcgtgggarttcatgggaagttttcgagggctgttgtatgccaggctttattctggtttcaggagagagagtgactaaggagtgctgttaagcttccctcacaatctggaggaggcaacagggttccctacagctagttctgtagaactcagacaggcagaacagtcaacttggagtagcctgcatgtccacccgttctgcacacctgccacagagctgataaccgcagcagctgttccggggggcattccagaggtttatgttccttagccacagctgggccctccactctgccccccttcactcacctgagatgtcacctcctcatttcacctgggcaggtgacaccatcagcatcccagcccacctctgtytgcctccaccttggcccagtggaggaggagttctctccacccatgctctgggttccctgtcctttcccatcctcaggraagccttgggagaaggaggatgttttaggaaagagctagtaggttgatctcagtgaccagaaggaagtttagaggactctgagacctttccttgaaaagttagatgagattgagaaatccctgggrgctgacctggaaacctaagggacatggagagtggttcctggtcagtgtgttgctgstagttccaggccccctgggaggtctttgagcagcagatttccaagctaactgtagtgtttgagttgatgaggaatatttggaggaggtgtggtgccgtgtgtttccaagggcccctcttrtctctggttytctggttstagaacaacacaagcatatataccttccatgaagaaagagctccaggtacaagttgtggcaagagaattatctgctctgtgccagatttgtgcattttcacaaaaggtccattttcaagattgtctgttgtttgtttccttccttcctcaggttctggaatgaatttgttgcagatacaggataaagtctggtcccaggcttgccttggtgcctgtgcacctcatttagaggagaagcttagcccaccagtaccatcatgctcagttgtggtaggtctcctttctggtgatgtggctcatttaagagctggcagctaccagggaagcactgtagcgcacacacacrcrcacacacacacacacacacacacacacactctgcacacacccttatttgttcactcacccacaggcatacmcatgcagggtcttcagtttagcctaagatgtaagtcagtgtctggatcagtgccttgcacacagtaggtgctcaggtacatgccttatggtcagcgggactttggaaaattccactagaaatttattagaatagggataaaaatggcaggtgattgcatagctaaagaaaaagtgcacagagtgctgaaattctagggactactgatgaagcttgaaggaggcasccttggggaaaatagaaataccagcggggctggcacagcacaggccctggcactggacagcatgggactgaattctggttctatcasctttgtgactttgtgtctcggtttcctcatctggaacaaggggaatgatgctattcatcttacagggctgttgtgcaaattagatgarttaatacttttaaagcacttaaaaaatartgcctggtcccacmggtwatgggaaaaacatttacccatcacagcggccccacccatttgcagtggacactggytgtgaatgccctggggtgttctacttggccagccctgttctccattgtcctgtggggacagtggagtagagagagagagaaaaagatctgggtgctgcccctggggccctttggtgggaaatgcttaccacagagccagaacaaccagaaggaactctgggtgggacagagtgctggtgtgaagaagggacaagggcaccctgaggcctggagggagtcgtgtaactgggaatcttgggccatgtggaggaggggctgctgtgaggacttcgcgttgggagtctcagccacagaagcacttttgttttcttttcagagacagagtctcaccttgtcacccaagttggagtgcagtggcatgatcatagctackgcagccaccaactcctgggctcaagtgatcctcctgcctcagcttcctgagtagctgggaccataggcttgctccaccatgcacagctaattttttttttttttgagacagagtctcgcttttgtcacccaggctggagtgcagtggcgcartctcggctcactgcaagctccgcctcctgggttcacgccattctcctgcctcagcctcccgagtagctgggactataggtgcccgccaccacgcctggctaatttttttatatttttagtagaracggggtttcaccgtgttwgccargatggtctcgatctcctgacctcgtgatctgcccgcctcggccttccaaagtgctgggattacaggcgtgagccaccgcacccggcctaatttttttttattttggtagtgacagggtctcactatgttgcttagattgggcaattctgcctcagtctcccaaagtgctggaattacaggtgtgaaccaccgtgctcggccgtttttcttgtatgattcacactgacatgctgaaaacagcctctgccaccatgaggcagaatgtcaaagccaaaccatcagcatccaaagtatgccatgaggccagtgcatggagctgaaggaacagccatgtggccctgtggaagctgacagcacagctttctgacccgctttctgacgcaggtcagaaaggcagagaaagggcagacagaaaacagccaagccaccgggactggtaatccacacacggcttttagttggatgtgaaattcagagcaggctttgtttgccttrtgcgagaacacatgcctccaagaaggagcctgtgcagacaagcagcttgaggatygggaaagaactgactctgaaaaggcattttcatttgtcacgtaggtgtcacatgtgggggaaccactcaagacccatgtttttcgtcatccctctttttgcaggtagtgctcagatagccctccctgcactctgtcttttttggattactttccttagaacattgctctctgcacgttcacgtccaattattgttaatccagtcactggggtgatagagtgagtgtgtgaggcattatctgctcccatgagtttgcttactggtgtcctgttacctttttttttttaatgctatatccagaatttggagcttataaagcaagcacaagttaggggttggtttgttctctctaycttaaatctcaagatcagcagtttttgaaatgacctcatgctcgtggtttccaaacctgcactggacttctctggcgatttgtgaacaggagggacatgcccagtttgtgacaggaagtgatgtgactccaggctctgcaaaagattccttcaggtctggtgacctggagactgtagcrttttcgtggcctgaagggtgggtggctgtgctgggcaggcgggatttacctcaacagagcacctttgctttgtccccgtccctcagggagccatttcttcctacwacgtccagcgctacggatttcctccaggatgcaaagtggtggccttcactggggacaacccaggtgagtatctcggggagtttcactctccagtgagcctgactgggtccatgctggatgtttgagaattccagtccagcctcttggtgaaaccttctgtggtcattcctcaccacccccacccatgctggatgtttgagaattccagtccagcctcttggtgaagccttctgtggtcattcctcaccactcccaccctgcgatctgactccttgtacctgccccatcttagctccgactctgccctcaggagctggtcagtctgctctctctggatgaaaactgcccaatgattatggaaggcagtcgtgcccaccccatccctaacctgtcttttctgtttcaagatgaatagctcaattcctccaacccttcctctaggacatggttttaagtctctgccctgtcatctgatctgcagcaatgacttgtttctcgtccagacacctyatctccttccctagcctcttctcttcctcctcctctcctctgggtagccctgaagccactcctggaggggcccttggatctctgaaggaaggccaggtgggctacactgaataacamcctaactactacccctcaacctcacccccaccccaggaaaagtaagtctttttctaacgatccaccagattagggttacatttaacagtaactagaaaggttaattttaaccttaatcagaaagattaatttctgtcctttcagtcttctttctgtgctcataaataagcattgtttcttttaatcaacctgggcagtatctttctcattttaacagttgtctagagctcagttgtcccagcatttatttcactggtccctgatggatggagggtggtgttgcttcagtgtttgggcagtgcagacgatgttgagattcacattcggtctcgtctctttgttgttataggataagttctcaaaggtgggattcctagatccaaggcttctgacacacacactgctgattgaacctcagtggcagtgtttgagtgcacctgttcctcactcccatttcacctttattcacatgttgattcactcagcatttagtgagtgcctattatgtgccaggccttccttcagtgctggggcccttcagcaatcaaggcagataaagattgctgttgtgagccatgtgtggtagtgtgcacctgtagtcttagctacttgggaggctgaggtgggaggattgcgtgatcccggagttctaggctgccgtgagctatgatcatgccactgcactccagcctgggtgacagagtgagaccccacctatatatctcttaaaaaaaaaaaagattgctgttgtgggctttgtgtctaaggcagggcacagagagtgaacataacctcacccccttcttttccattactgcctttgtctttctttgctgtatatccttggtgtcttgtcttggcctccttgattctctgcactctcggaagtgcctgacagtggagggatgtttggaccccttcagggaagagacttcacagctcaaatcagcggccctgctaacagagacttcaccccgtgacccctatgaccttctcckcttagggcctcctgagcgctcagctcccctgctcctgcctccaccctagggtgtgggtgggggttggaggtgggggctctgcgcctgcctggagagccctgtggtttgctttgtggttcccatgtggccgccagctaaccagaakctcccctcccattctcagcgtcgctggcaggcatgagactggaggaaggtgacattgcggtaaggcgacttcccacacccataggctctttctgtttccacactcacacccacactctgataagtagcagaggtgctgctgagaccsagatcccagggtcccagggtctgggtcccagcaggatctctgckacttatcagagtgtctgccggttccaaaagacagtggagggaggggatgggggcgcacatctttctcagaaagtcattgttctttgctagatgggcaggacccctgcctgcttcacagtggccagtcttagtgcatgcagtggcagagggtcagatgtggggccaaagggctgtgagcagcgcagatgaataaggaagacataacccagacattcctacttctagtgggaaagtcatatggggaaccagccatcacccaaaccattatttagatgcagttgtgggaaatcagcacagaagatccatgagatctgcatctggggagctaactcctggctcatctggtatgggagggtcagaagtggctcttagaaagtggccttgcatctgaggtctgcagcatgagtgaagtgacagggttaaggtgggtggagtacagcgcgtcgctggcagagggcagcgtgtgtgggcaaagcccaaggtgcccacctctgcctatctctcctcaggtcagcctgggcaccagtgacaccctgtttctctggctccaagagcccatgcctgccctggaaggccacatcttctgcaacccggttgactcccagcactacatggcactcctgtggtgagcttgggtgttggttggcaccattccctrggtgaggaggtgtgggcaggtctggcaccatcttgaggaccccaagtcattccactaagctctggaatgactccctccactttcccgggctctgctgggcaactgagacccccaaggactcaccagctcttgctgacagcagagctgggtggggaataacccaagaccctgtgtccttcaagcccaggttcaaattctatcctcaccagctatatcctgtgtgaccttgggcaaactctgtagtgtggcatgtctgagccacactttcctcatgagatggggagggtaagagcatttacctcacattgttactgtgacccgtctggcatgtggtggaccctcagcaaatggcgggaaggacatcctgcctcccgacggctctcatggaagggacatgctctgtgctctgaccacaggcctttggagacctgtccaaagctcctgagggaaatggtttctgagctcctaagccctaagaaccattggagaatgtggctagttaatctagccctccctgcctcattgtgcccatggtagaatgtgcagaaacccaagctccctstctctacctggggctcctctgygtcagcctcctgtgtaaacagcccaagacaagggcgtttccggcacctcccagggacattcaggggcctgaatctgaggaagagcctccgatacctaagtttcaaagcctgctgtgcactgactaggggtcgtggtccagcctgacctgcagttcctctgcctgagtctcttcactgaaactcatgggtccagtcagcaagcaccagctccctccctcagagctatgcyctcttctgcagctttaaaaatggctccctcatgagagagaagatccgcracgagtctgtatcccgttcctggagcgatttctctaaggcactgcagtccacagagatgggcaacggtggaaacctgggtaggccagttggtggtgcccaggcctgtgaagggtcagcagctgccgactggaggggcagagcctggggccccatgagctgggggagaggagggccgtggagaagtccaggggagtcctgtctgtctgcacttatattccacacatcctacaagctggtgtggaaccctgtgttctgagcaagggtggggctgtaaggctgtccttggcttctgctctgagcagaacatcaggccatagctatgtcttctgtccccaccaagcccctggtgacagcatcaragagggcagcctctaccctggtgcatccccgttcacagcctctgccccaggcacaaggaaaagtccccagtgtctgggcaggcctgagcagggagggtctgtgcctcccttggtcaaacctgttttgatattttaggattggctgggcagctgcttcctattccaggctgccaagtgagagcaggaagagttgtctttgagaaaagctagctcagggctccctggttcccttctatcctgttggagagaaggaactgagaatattcacaggtctcatctgggggatgaaagagccaggggacccagggatatggggtcattttgtcctgttctaagtctgttaagaagctgatcttttgttttttgactaatgacggctgatctcttcctggttttatttcaggtttttattttgatgtaatggagatcacccctgaaattattggacgtcataggtttaacacagaaaaccacaaggtacatgtgctgttggtgttggagttacattggctccatttgtgagtgtaaaatttaacaattgcctatcaaattatgttacttttagggacttcattcattcactcatccattaatatcatacacacttgtggtgtgccagggtgcattctagatcctggggaatctgcaggacctaagacagacacggtcctttccctcagggaggaatgcagaaaacctgagagttctcttcctatttaacaaatgctaacactatcattgtgtatcacagaacttatttccttggcgagttttatcctatacccatcaagaacccatggatcttgagatcatgaatttcctcctggttgaaagagctgctgagcccaggaggtactaacgtttattgagcccatttggtgccaggcattgtgctcatggttttctataccttcctcatttacttttcttttttttttttttttaattttttgagatggagtctcactctgttgcccaggcttgagtgcagcgggacgatctcrgctcactgcaacccccacctcgtgggttcaaacgatcctcctgcctcagcctcctgagtagctgggattatagatgcaagccaccacacctggctaatttttgtatttttagtagataggggtttctccatgttggccaggctggtctcgaactcctaacctcaagtgatacgccccctcccaaaatgctgggattacaggtttgagccaccatgcccggctatcatttacttttcaaagcaataggcactattgttcctctttctagatggagaggttgagactcagaggctcaggctaaataatctgcccagagtcaagcaaggtcatagatggtggagggggctcaaacccattcctctctggctctgaagctgctgttttctttctcctccacaatgtgacctttctcgggaaggatttagttggttcttgctcctcaaaattgacattgctgctggagagtcactggagagtcatcaccacattttgggttgtacctgagagatgtttctgaccccagtaaatggggggtttatgtaagacactctgtctggaaactgtaactgtcagagytggcgttggattcagtggcagatgatggcactacatgttggattatgaatggaaagctttgtataaagtaggaagttcatctcaatcttctgatggaggatcagtttggtttcttttgttagagtgagaagctatgcctgttctctttcatgcatatcaatcctagatttgtcaaggagaaagtagtgttcttcattcattcattcaaccagcagatatgtatgattggtgccaggcaccggggacacaaaggagaacaaaacattggtggcccttgctccccagagcctgctgtctaggagggagagggacagtagacgactgaatgagcaygtacatgaatgcagcaggtgctaaggctaggtkgcagaagaacagagtgccgcaaaggaaagcagctggtgggcgggttggagacttaccctgggtggggtgatcaagcctgggcgtctctgagaaggtggcctttaggttgagacctgaaagtactcaggatctcaccatggaaagagtaggatagactttcaggcagagggagcagcttgggaactagaagaaggtcagtaaggttagagtgtagctgtttatgagggggatggcggcaggttctagcattggtctcaggtgccagagaagcaggagtgagcctggggttgatgcccatcagtgctagcttgaaggacatgccacaggggtgggatctcagcgtaagctcgtggctctcacttatctagtatgtactgcattttccaggctctgttgtctaatctgatcattgcaacaaccctaaaaaacaggcgccactattacctctgttttgttaagaaaaagaatgatagcaagactaatgtaacttattgaagattgcagagctgaatggtagacagaacttgaactctcagctgcctgagactaagttctgtaatgtctcttgactctcttcaaagtgacatgcatgtgaggctgtgagcttgtgtgcttgagtagtgtgtttgtgtgagtgtgtgtgacaggcaaagatagtggttaaagagcccagctatgagtttcaaatctgggctgttgtttaaaaagatcacacacagacacacacatacacacacgaatggacaatgagagttccttmctctgtgcccaccttttcctggagacaggttgcagcattccctggggatgtggaggttcgagcactaattgaaggacaattcatggccaagaggattcacgcagaaggcctgggctatcgagtcagtaagtgagccactggcagcatgtgtcccggggtgggggctcagggccagctcactcgcaggggccagggctagtggggcaatatctactaaagttttcttacagggggacttgygcaggagggaggtggagcctgacctcagggatggggtgagaaagtgtcaattggcacttgtaggcaagcatagaatagcagacaggttgttcccgcttctcagctgtgtccacaatagcctgaccttttggccaggacctgtaagacttsggaatggtctttctgaaaccctaagctccaagctgcagatgagctgtcctgagctctggactgcaaagacataggcagtgcaaggtctggggacatgaatggatcttggccttctagcctggccaggtcccattgcctgtgggacacagtctgggtctttcagcttggacagggaagagggggatgtagtaccactgtcaaaactcggaagactgatgtcttagttcattttctgttgcctataacagaatacctgttcctgggtaatttataaggaaaagaaatttatttcttacagttatggaggctgagaagtccaaggttgaggggccatatctgaagagggcctgcttgctagtagggctctctgcagagtcctgaggaggtagagggcatcacatggtgagggagctgagtgtgctggctcaggtctcccttcctcttctcagaaagccaccagtcccgttcccacgataacccgttaatccattaacctgttactttgttaacccatgaatggattaatccactcataaagccctcatgacccaatctccttaaaggtcccatctttcaatatgtcatgttggagataaagcttcaacatgagttttggaggggacacatattcaaaccatagcaactggcatggagagggcagacccagggccgggggaggcaaaaggaggagaargggatttctgacaacttgagctgtagaataatcagcattaggatgtcagtgagttccccttacaggtggcgttggaatggtctaagggtctgtaaggaggttggactggccgcctatagagtccaggtttctaagatgtatttgtctctctgggctatagctgttgtcattagagaagatagtgaagctgctttgcttgagggccttcctatgatactctatggacaatccaagttctatgtaatatatattttatacctttgaatcaactgagtaaaaggatactataaaaatacctattagggaaacctcttagaaaacctgttagacagcatctgctaaagctgaatatacgcctacccagcaatctcatttctaagtaaaggcacaacaggaatttttgcatgtgtttactaaagatgtacaggagaacattcattgcagtactatgctgaatagccccacagtggaagtggcccagtgcccattaatagtagacagaaaaaatgcattgtggtgcatttgtacaacaggatactacacacaaatgaaaatgaaccagcctcagtgatmcacaatgaaatgggtgaatctcaccaaatgtaacactgagcaaaagaggccaaacatggacatacatatggcaggggtctctgtacatcaaattcaaaagcagatggcactacaggccaggcacagtggctcacacctgtaatctccacattttgggaggccgaggcaggtggattgcttgagtccaggagttcgagaccagactgggcaacatggtgtgttgcgggaagtcagggaccccaaacggagggactggctgaagccatggcagaagaatgtggattgtgaagatttcatggacatttattagttccccaaattaatacttttataatttcttacacctgtctttactgcaatctctaaacataaattgtaaagatttcatggacacttatcacttccccaatcaatacccttgtgatttcctatgcctgtctttactttaatctcttgatcctgtcagctgaggaggatatatcgcctcaggaccctgtaataattgcattaactgcacaaattgtacagcatgtgtgtttgagcaatgtgaagtrtgggcaccttgaaaaaagaacaggataacagcaattgttcagggaataagagagataaccttaaactctgactgctggtgagctgggcagaacagaaccatgtttctcttccttcaaaagcaaatgggaaaaatatcgctgaattctttttctcagcatggaacatccctgaaaaagagaatgtgcgcctgcgggtaggtctctgaactggcccccctgggcgtagcctgtctcttatggttgaggctgcagagatgaaataaactccagtctcccatagtgctcccaggcttattaggaagaggaaattcccacctaatamattttggtcagactggttgatcccaaaaccctgtctcctgataagatgttaccaatgacaatggtgcccgaaacttcattagcaattttaatttcacctcggtcctgtggtcctgtgatctcaccctgcctccacttgccttgtgatattctattatcctgttaagtacttgatgtctgtcacccacacctattcgcacactccctccccttttgaaaatccctaataaaaacttgctggtttttgtggcttgtggggcatcacggatcctaccaacgtgggatgtctcccccagacacccagctttaaaatttctctcttttgtactctgtccctttgtttctcaagccagccgatgcttaggaaaaatggaaaagaacctacgtgattatcggggcaggttccccgataatggtgaaaccccttctctacaaaaaatacgaaaattagccaggcgtggtggcacatgcctgtagtcccagctactcaggagactgaggtgggaggatcgcttaagcctaggaggttgaggctgcagtgagccatgagaccctgtctcaaaaaaaataaaaaaagcagatgaaactatttactattgttggaagtcgggataattagtagttacctttcagaaggggcctgtggggtgctgtcaatgttctgtttcatgttccatgggtgtgtttagtttttaaaaatttatgaacattataggcttatgatgtgtgcatttttcaggatgtgtgttctaggtcaatacaagattttaacatgtgtaaaatgaccaccatgagcattctgattgccctcatcccaccaccctaagtgtaaaaagacgtttcctaaaggtctgcaaagacttccaagttccctgaaaatgagactgggtgagcagggcagggttggtgctggagttggtggagtgcctggcaggggtcctccgrctgtcagaagagaaccccagggaacggaacagcccagcatacagggagaagcagttagggcaaaaggcccccatgggctcaggaggagctgatgggattgtggcattattcccagcctctaaggcatttcttgtgcaaaacagcatagagttacttatcctcttagcaagcttaaatgcagaatcagacctgtcttgccgctctgctgagtgatcacttaaatagacatacttggaaccaacagaggttgcrcgcaygtgaggactcattctccaggctgctgtgtggactggccagctctttcgttcttgcccagacatcatctcatttggctttaatagtgtctaagggcaataaagaggcactttgaataaaaatgattattgtgatactaacagctgccagcatttgttgggcactgagtgtgtgcccggcccagttccttagcaattaatctttattaacaacagtaccgctgaagtaggtactgatatgattcccacttcacaaccgaggaaaccaaatcttgcagtggttaaataacttggtcagggctggcagagctgggatctgaaccaagcsagtctggctccagatgctggattctcaaccactggctgaacctgctttttttaaggaacaatcgccctcttgatgtttatagacaccatcagacatgatagaaaccagctgggcagggctaataagccatagttttcagtttatatttcagtgtgtttcatgttgtttaggttgattgtaaaaacagtcaaatcttgtaataacaagtttgaaaaataaagaaaatgggcctggtgctcacacctgtaatcccagcactttgggaggtggaggcgggaggatcacttgagcccaggagtttgagactggcaacagagagaccatatcttcacaaataataataattataaatatcccagtatagtggcatgtgcttgtggtcccagctactgggggtggggtggcaggggtggcaggaggccggggggatcgctggagcctgggaggtcaaggctgcaatgagctgtgattgcaccacttcactctagcctgggcgacagagcgagaccatgtctcaaaaaaataaaggaaaatgactcataatcccatcycctctctccaaccactggtatcatttagggacattttctcccagtctcctttatgagcttatttccatacagccatagttttgttcctttgtaccttatatgcaaagggtgtatacaagaaccaaagtttgtcagaagtcatmtttgtggtgctgcgtatgatggccaggttacttttcctgcatttgggcactgagggtgttcttgttttytttgtttgtttgttttctttgttttgttttgttttgtttttctggagacagggtttcactcctgttgcccagactggagtgcagtggtgtgatcttggctcactacaacctccgcctcccgggttcaagtgatcctcctgcctcagtctcctaagtaactgggactacaggtgcacaccaccacgcccagctagttttgtatttttagtagagacggggtttcaccgtgttggccaagctggtctcgaacttctgacctcaaatgatccacctgcctcggcctcccaaagtgctgggattgcaagtgtgagccaccgtgcctggccattgttcttggttttccaacgtggaatcacactagagcatcttccatagcttgaattatttccccaggaggatggcagtccttctctcttcccagacactgtcttcacggccagcgatgaagatgggagaagctgagaggtgggggctgaatgtcttcttctggacagagccaaggggctggatggaaagcagcaggtcttaaaaacaactatttgttttaaaatacataacgaatggatgtctttttatcacaaaagaktcatgcaaaacagaaatatggaataagaagcaaatgcccccttcatwtgcctcccagactcctttccagactgtgacttccttcctgtgagtttctgtgttagattgaatcatacggaattgccaatattgaagaagttttgatttacaaaaatggcaatttcatatggttcgacctgacacgtgtgtgtgtgtatatatttaacagaaatgctattacattctatgtgttattctgagacttgctttccataacagtatgtacaggtctacctttttgttttctaatgactggcatgaggtctgataaattattttatagccctagttgaaggacattaagattatttcttgttttgttttgtttttgtttttgttcttgttttgagacagagtctcactctgtcacccaggctggagtgcagtggtacaatctcagctcactgcaaccttcgcctcccgggttcaagcgattcttgcacctcagccacctgagtagctgggattacaggtgcgcgccataccacctggctaatttttgtatttttgtagagacggggtttcgccatgttgcctaggctggtctcaaactcttgacctcacgtgatccactcatcttggcctccaaagtgctgggattgtaacctccactttcaccatctcattctatgccctatacccttgtccctagttcattcttgtttgtgtattttttttcccttgagcatgttagctaaaggttggtatattttattaagcaatgttaatattttgttttgtgctcccttttattaatttctaattttatctttttaaatgctttccttctactttatgaattttttctttttctgtatttttaagttgaaattttagctcatttattcctatcctgtattaacttctaatttatgcatttcagaatgctacatgttaactttatttacataacatatctttcatttctaaaaagatagtaattttcatctttttctgcatcagtgagtggtccttcaaactggcccctcgtccttttgacatatcttccatcattccttgagcatttccatagcttctagtataaaaaaagtttcaggctcatcttgttttttccttggatcagccttgtaatcttccatttatccaaggggccctgacttctctgagtgggagagatgtttggatgctctctctggatgctcattgctactgggatgatgctgttcccagcccctttcagtgggctgagctgggaatatgtaaggatatataacaacccctttcagtgggctgagctgggaaatattaggatatatatatacatatccaaatatatatatgtctgtatcaatacacacgttacctttctatttgtctgtctgtctacttctccatgtgttgaaaaacatgagttcaaccctatacactctacttccagtccaacaccatggggttcattctggctttcttccttcccatatttgtatcttatcctaacagtgacaaagttgattcttctgacccctccagattgctgcctccttgacatgcaagccccattttggcttctctgcttacccttacctgtgttgtctctgtgtcgtctctccagcagcctcttgaatctgccccactctggttatgtacttacatgtggcccttgagccacttctgtttgcctatttaatggctttttagagaaggaagaagaaaaaagaaaggtaggaaggtagacaggcaataaatatttttaaagggaagggtccatttacatttaatgtaattattgaaatgattggatttaattgaatctatccatttattttttatttttttaatccatccatttacaaaatggattacatatcaatttttctttttcttttcttttgttctatatgttcttttttctttcttattcttttcctgtcttatttttggattaactgagcaatgtctagtattccattttatctcctctgttggctttttaaggtatacactttttaattgatttttaaattgaaatccttaatttgaaaagtctggtttgcactaatattatacacttgaattttttacgaacatgcttgcactacaagaatgactaaaggatgtcttccgggctaaagggaaaatcataccagatggaaagtcagagcttcaggaaggaatgtagaacatctataaaaagtggattctcttaagttttactttgtctgaaaatgtatttattttacttcatattaaaataatgttttctgctgtggaattctaggttggcactttttactttcagcactctgaaaatgtcatttcattgttttcttgacttctaatgtttcagataagaaattaactgtcattcttaatgttattctcctgaatgtaatggggttttcttctctggctgatttaagatttttctattaatctttgattttcagcagtttgattatgatatacctaagtaagggttttttaattattattttgtatgtatcccctttgtgattcactgagcttcttggatctgtgggttaatgtcttccatcaattttggaaaattcttagccattatttcttcaaatatttatttttccctattccctctttcctttcctctggacttcagttacacatctgctgttgtcccataggactttgattttctattcttttttttttttctctctctccctgcttcagttggacaagttcattttttgttttgttttgttatgttttgtttttttgagacagagtcttgctctgttgcccaggctggagtgcagtggcatgatctcggctcactccaacctccacctgctgggctcaagcgcttctcctgcctcagcctcctgagttgctgggactacaggcaagcgccaccacatctggctaattttttgtrtttttagtagagatggggtttcaccatgttaggcaggctggtcttgaactcctgacctcaggtgatccgcctgcctcagcctcccaaagtgctgggattacaggcatgagtcactgtgcccggacttcagatggacaatttctatcacacctctttttattcatgtttctgctgtagacagtctgctattaagtccatctaacaaattcattttggatattatattttttctatttctagaatttccatttcattctcttatactttcttatgtctctgctgaaatttttcatattttaaccattttgtccatctcttcctctgactttatatcatctttataattattataaagctcctatctgctaattcatctcagagtctgcttttatttactattttactgccatttcctgcttcttaaaatgctatttaattttgtttgaatgctgtacgttgtgtttaaaagtacggtgttgactaaagtggctaatttttaaaccttttacttttgagataattgtagattcacatgcagttgttaaataaatagctaatgtttacctgcagaaaaggcttgcccttctatcaggaagtgcgggtgaggtggtggtttttttttgttttkttttttttttttttttacttttatcatttaatttttatttttaaaaatgtatatagtaaaaaagctgggttgcggagatgtcggtcagtggattaaaaattttggttagggtacaggaacatattcaagagatttattgtacaacatggtgatgatagtttataacagtgtattgtattcgtcaaaattgccaagagattttaggtgttctcaccacaaaagataagtatgtgaagtaatgcataagttaattagctcaatttagtcattccacaatatatacatatttcaaaacatgttgtataggataaatatgtgcaatttttattgtcaatttaaataagtaacaaaataagtaaaaaaaagtctagaagcctatataacagcatactaacagtgtaactctggtgtaactagggttggtttttactttcttcattttgtcttttctaattttttgtatagtaacttttatcactgggcttaacaggaatctaaaaaatgtatttttagcaattgttatgttatatccacaacatgatctatatattttgtcagggaggtttattttttgactcagaactagtttgttcttgaaatatgtactttattcttttaattagggcttaaaatgttaaaatatttctaaagaggactattttgggactctacagtgtacctctttaatgagaacrcccacagtttaggcctattaaggcatamttcctttattttactaaagaattaaaataataaagatttgataattttctttcttttttttttttattgatcattcttgggtgtttctcgcagagggggatttggcagggtcataggacaatagtggagggaaggtcagcagataaacaagtgaacaaaggtctctggttttcctaggcagaggaccctgcggccttccgcagtgtttgtgtccctgggtacttgagattagggagtggtgatgactcttaacgagcatkctgccttcaagcatctgtttaacaaagcacatcttgcaccgcccttaatccatttaaccctgagtggacacagcacatgtttcagagagcacagggttgggggtaaggtcatagatcaacaggatcccaaggcagaagaatttttcttagtacagaacaaaatgaaaagtctcccatgtctacttctttctacacagacacagcaaccatccgatttctcaatcttttccccacctttcccccttttctattccacaaaaccgccatcgtcatcatggcccgttctcaatgagctgttgggtacacctcccagatggggtggtggccgggcagaggggctcctcacttcccagaaggggcggccgggcagaggcaccccccacctccctcccrgacggggcggctggccgggtttttttttgtttaatcaggggttggatcagtactagttagttttagttcaccagtagttgcagtgtcttgggatcaggatcagcaggatcaggcccctccctccatcaagtctttgggacctaaccactgagattacagagctctttctctgttttccagctcttcccccacttccacatcactgcttccatagtagttcactggagacatttggtgggtagggaggactagctctatattggagactcttccagatttcagtcctccataccagcccaaatgtagttgtttttcttttctagcaaattttatctgcctgtagagtcttacttcttcatgtctcccatgctgcaggtatgaatcagcacttaagggctcatctcattctggaatttattttatttagacttcttgaatttacaattttttgatagcttcaagcaaaaatatgatgctctggttgttgttgtttattccattctgtcattgttacagcacaaatgtgttctttcttgaccatcatcatcttagctggaagtggaactatatgtcttttattagattaaggtttattattattttactatttatttttatttatttattctaaaatggagtttcacttgctctgtggcccaggctggagtgcaatggtgcattctcggctcactgcaacctctgcctcctgggtttaagcaattctcctacctcagcctcctgagtagctgggattacaggtgcccaccaccacacctggctaagttttgtatttttagtagagacggggtttcaccatattggccaggctggtctcgaactcctgacctcaggtggtcttcctgcctcggcctcccaaactgttgggattacaggtatgagccactgtgcccagcctattatatttttttggagacaaagtctggctttgtcaggcaggaatacacccaggctggagtacagtggtgtgatcacrgctcattgcagccttgaattcctgggctcaagcaatcctcccacttcaacctccygagtagctgggaccacaggcatgcatcaccgtttccagctaatttttgtattttttgtagggacagaatctttgttgtccaggttggtctcaaattcctgagctcaagcaatcctcctcctgccttggcctactgaagtgctaggattagtaggcataakccactatgctcagtcagtttattgtgaaaaatatcatgtatacagtagagtatatgtatcttacagcaagttataaaacatattaatcaaacatctgatgatcagcactcgggttaagaaatagaacatcagccaggcacagtcacttacacctgtaatcccagcactttgggaggccgatacaggcggatcgcttgaggtcaggagttcaagaccagcttggccaacatggtgaaaccccgtctctactgaaaacacaaaattagccaggcatggtggcggacgcttatagcctactcaggaggctgaggcgggagaatcacttgaacccaggaggcggaggttgcagtgagccaagatcaccccattgcactccagcctgggagacagagcgagacttcatctcaaaaacaacaacaacaacaacmacaacaaaaagaagaaatagaacactagaaccttggagtcttgctgtgctcctcttccactgtatcctcatcttcccctcatccctgcagagatcatttctatccagatttttgtattataatttccctggaattctttatggttttgccagctgtgtatgcattcctttaaatacattgtggctttttgccctttctgaacttcatgatacatggaattatactacatgcggtgtgatttgctgctttagatcaacgtcatgtttatgaattcatccatgttaatgtgcatagatagctattagctgttaattttcattgtactgtgatattccatcacatgattatacaaccatttatccatttgctatgrcctgactgtgtctccccaaattcacatgttaaaaacttaatccccaatgtgacagtgttgggagatgggcctgatggaaggtgtttaggtcatgagggctcttgtgtattaatgccactataaaagtgctttcaggagtgagttcaccattttctgcttttcagccatgtgaggacatagcattctggggattctgctaaacattctacaatatacgggacgatccctcacaaaaagaattatccaacccaaaataagcagggttttattctggttggaagaggaatcaagcttttttctgtgatgagtagagctactttccatgtttgtctccatgcctgctgtgggagctcagtgtcatttcaagttcctcttcactcagtccccccatgcaccctccccagctagtagcccactttcactaatgagcacttctttactttagcttggggacaaacactgctgctgcttctgctgctgagtgtaagggagtggagggaagggtcttgagacccctgctgtcatgaagtcagttgtgtactctcagcagcagtttatgagggttcttattttcccatatccccaccaacacttaacagcaacaacctttaaatctgttgccagtctgatgggtgcaaactggtatctcagtgttagtttaatttgtgttttcttaattaacgatgattttgttttgttttgttttgagatggagtttcgctctttttgcccaggctggagtgcaatggcgcgatctcggctcactgcaacctccacctcccggttcaagtgattctcctgcctcagcctcctgaataactgggattacaggcgcacaccaccatgcccagctaattttgtatttttagtagagatgggatttcaccatgttggccaggctgatctcaaactcctgacctcaggtgatacacccgtctcggtctcccaaagtgctgggattacaggcgtgagccaccgtgcctggccaattaataatgattttgaacagctctttgtaactctggtttctttctctgaattggctatgtacattctttcccatttttctatttgatttcctatctttctcttattgatttgtaggattttattgtatactttgaatattaggtttttgacagttttttgtgttgcagatatctctcatttatctgttgcttatttatagtgtcagcaatttaacagaattttgatgaaattcatcaatttttcatcttccattttatgcttttgagatattgtttaagagatttccccccactccagtatcacagaagtactgttttatgtttctcctgttgatgttacaattttaccttccacatttaggactttgatccatctgaagtctttgcgaatgatgtaacttgggatccaatttgattttttccacatgttgatccagttttccaaacactatttactaagtggtctgttttaccccattacttgtagtgccccctttatcatttatccagtccctatatatacatgggtctttctctgtactccctttcattttttttttcctttttttggagacagggtctcactttgccgcacaggctggagtgcagcggcgcgatctcagctcactgcaacctccacctcctgggttcctcccacctcagcatcccgagtagctaggactacagacaacgtgctaccatgcctggctaatttttaaatagtttttatagaaacagggtcttgccatttttcccaggctggtctcaaagtcctgggctcaagcaatctacctgccttggcctcccaaagtgctgggattacaggcatgaaccatggcacctgacctgcactcctgtttctacttcatgggtttattggtcttgttcttggggcagaaaaactgttgtattattgtggctttgtagtatgtcwgtattagttggctagggctgccataagaatgtgccacagaatgggtggcttaagcaacagaaatttattttctcacagttctggaggctaaaagtctgcgatcaaggtgtcggcagggttaatttcttcttaggcctctttccttagcttgtagatggtcaccttcttcctgtgtctccacatggtctcctcctgtgtgtccctgtgtcttcatttkctcttctcataaggacatcagtcatactggattagggcccacccctaatgactttatttttaacttaattacctctttaaagaggtaatatctgtctttatcttcaaatacactcacattctgagawactggggtttaggacttccacatataaatttagggtagacacacttcagcccataataatgttttaatatgtagkatagcaattatcccctccttgcttttctttttaaratmttgtctgagctgtttataggtcttcatttttccacaaatattttataagaaattggtctagttccttaaaagagtccagctggaatttttatttaggttgaataggatgtatacattaattggaaaagattgacatatttataatgttaattcatattcattcaagaccatggaatatcttttaatttatttagatattcttttttgtactttaacaacaatttcaactttttcttaatagagacttttgaattctttgttaaggtattcccttacatgtaagtctaccttacatttctggttgctgttgtgaaagttaatttatatattttctattgtatttgatagttgattattattagaaatgccattgattattataagttgattttgtatctggcaaacttattaaactcttgttagttttattagtttgtttattctttattttttccaaatagatggactattgtctgcaaatgacagttttcttttcctttatttcaatacttatatattttagttgtttttgttatcttatggcattgactggtagatctaatactgtgttaaacagtggactggatactgtgaatctttgttttgtttgtagttgtattagttatctattgccatgtaacaaattatctcaaaatttagcagcttaaaacagtaataaatgtttattctcttayacagtttctttgggtcaagaatttggtttcagcatggttgggtgattctgattgaggatatctcctgaggttgcagtcacaatgtcatctggggctgcagtcatctgaaggcttgactgacgctggaggatctgcctccaggctggctcactcatgtggctgttggcaagaggcctcagtctcctgccatgtagacctctccctagggctgcttgagtgtcttcaggatgtggcacttagctttccccaaagtgagtgatccaagagagcatgatctgtgtcagagcgagatggaagcctcaatgtcttttatcatctagtcttggacttcatacttcatcatttacacaaggttctattgggtatacaagtcggccctattgaatgtgaggggggactacttgaaggtgtgaatatcaggagggagggattatgtggaggccattttggaatctggctgacacaccagtctgaaagaaagtgcttctaaatctctgttaagaatgacatttgttataagttgtggatatatgacttttatcatttaaggaagttcccttctcctgttttgttgagatatttaaaacaaaaaaagtattaaagacagttaaggtgggtggggcagcaaccttacaagcaaatgaatgtgacaggcctgcacacacagagccagctttggatctctcccgtagtcctgtgtgataagtgggaggcattggcccatcatgagccctctgtagctgaagaactctgcaaaaacagccctttctgccttgggagaactggcatagctattttacttttttcttttcccttgcagtgtccaagacaaagattttggccacaggaggagcatctcacaatagagaaatcttacaggtaagcgttagtagtgggccttacaccatggcctctcccatatctgttatgtctaagagccagagactggataggaaggacagcctccattcccactcctgcagraatggggagctcttagctcacactccaggaagcagctctgttgccttacagctcacactgtgagtgggatctgtctcacatgcaggtgaattctatggctgtgtacaatccactctctgataccagcactgtcctctggagtcacatggaaagtgcctgttcttccacatggcaaaccttctcacatctagtgccagtgttcttgtcttcctcaaggcctctgccttccaatgtaaccatcgctgattctccaaccagtcctcttataacacagttgccagactgttactgtccttctggtccttcattatrccagaaacatatgaccaaaagtagaatcaacctgcagatgtctgacactcaractgtcacctgtggggctgtcagagcctgttatggagacattgtgcatttttgggtgtagcctggggctgccttaactgttagagtaactgtattagctgtttgcttgtgactacctatcttaggtaagatttttctagaaacagagcctgaaatgggaattcttctataagcagtttgttgagagagtactcccaggaagaaggaagtgagggactcagggcagtgcagaggaagaaggataagtgaggatatggtcttgtctggagtctacttcagctccatcctggtggggaggtggggctctggaacrtgaattataccacagagctgattttaccttgggacaagggggccaacaggccaccctggggaggttaaatctcctgtgagcggtggccyatgctcagccaaggtcagctttcttgaggaggtagtgctgcaarccattagtagccagtactcacagcagctggggcaggatgcacaatggtccagtgagggggatctgggtcggcatcagtggcatctactacaatatctctggtcaactaagacctcccccaagttctttccatgtgaactcctcttagtacaggtcctccatttgaaatgtatgcaatttatttgtgaacctaaatgggaaacttcaccattatscccatgaaacatgctcttgttagcttgggtttgtttgggcttgttaatgttagtctaatacccagctgtctccagccctaggtcagtgccatttgctaaacatacttcctaaatcttctgccttgtctttggtgaaatggctaaaaagtacagggacagcctggggagctgtggctctccactacggacytcccccagctcatcctgactctattatcaccagggtagcatgaccaagcatactcctcttaaggcagtcgaggtggaatggaagrggtcagaagacatatgagggagagagcctggaaagtgcatcccacaatgtctgtgttccctctgaggaatggctcaccacagtagaacctctgtgtccttttcaggtgcttgcagatgtgtttgatgccccggtgtatgttatagacactgccaactysgcctgtgtgggttctgcataccgagcttttcatggtaggttgatggagggagacagctatctctggaagtggccaggacatggrgtgggctgaggagggtggaaaggggagagtgaggtgtacccagtctttggggacattggagtcttggggacttcagcttcatttttctagctcccagcaggtgagaaccaacccatactctctgttcctttattctttgcttaaagtggagaaaaagaggctgggtcctaactgaatgakgtctggtcagagttaaggtcagcacagggacatgggaaaagaacacagggcatggttgagagcacgtgggcatgagtctggacagctagagggcaggagaggtggacaaagtccagagccgtcttttcagcaagaacagaagttgaaacaaaggggaaggcttcaggcccaagcagtccaggaccctggacagcaccatggagccctgttgccctgttggaggcctcgctaaaactctgggtattaagggaagctccccgatctaggcgagttctggcaggagcagcacctacctgcaagggcagtccttcaagttggatcaatttgctctgtctcctgcttgctcagggagctcctgtagcagcccaggtggttctattcttttcatattcttaacatttaacatacctatttcagcttatatttttcttttctttttttttttttttgagacggagtcttgctctgtcaccaggttggagtgcagtggtgcaatcttggttcaatgcaagctctgcctcccgggttcacaccattctcctgcctcagcctcccgagtaggtgggactacaggtgcctgccaccatgcccagctaattttttgtatttttagtagaggaggggtttcactgtgttagccaggatggtctcgatctcctgactttgtgatctgcccaccttggcctcccaaagtactgggattacaggcgtgagccaccgcgcccggcctaagcttatgttttctatcaacgttgagaattaatcaggcaacatatccttctctcaataattaaccttggccgggtgtggtgctcatgcctgtaattccagcattttgggaggccgaggcgggtggatcacaaggtcaggagttcgagaccagcctggacaatatggtgaaaccccatctctactaaaaatacaaaaattagctgggcatagtggcacacacctgtagtcccagctactcgggaggctgaggcaggagaatcgcttgaacccgggaggcagaggttgcagtgagccgagattgcgccattgcactccagcctgggtgacaaagtgagattccatctcaaaaaacaaaaaaaaataattaacctcttactcatttattctctccccaccccatctacctcaccctgcctcatgccatatcctatatcaagatcacttgggaatttatttccagattcttatattaagtacatttaatattatattggcttttattcacacttacctatgagtctgcctgcctgcctgcctgcctgcctgcctgcctgccttccttccttccttcctctgtttgttactttgtctttttttttttttaacttcctgacatttcggtcgggtgcagtagctcacgcctgtaatcccagcactttgggaggccaaggtaggcggattatgaggtcaggagatcgagatcatcctggcctagagggtgaaaccccgtctctactaaaatacaaaaaaaaaaagaaaatagctgggcatggtggcgcgcgcctgtagtcccagctactcgggaggctgaggcaggggaatagcttgaacttgggaggcggaggttgcagtgagctgttgcagtgagccgagatcgcaccactgcactccagcctggcaacagagcaagactccatctcaaaacaaaaaacaaaaaaaaacaaacttcttcttctttctcctttatttctatgctgaggttttgttttgttttgtttaagacaaggtctctgttgtccagcctggagtgcagtggcgtagtcatggctcactgcagcctcgacctcctagactcaggtgatcttcccacccccacctcagcctcccggatagctgggactacaggcacacaccaccacacctggctaatttttgtagatatagggtttcgccatgttgcccaggctgaactcgaactcctgggctcaagtgatcccacccacttcaccctcccaaagtactaggattacaggcatgaatcctagtgctaggattaccgcacccaggctgtatggtagttttgttggaatatacaacctaaataaatattttaagagagaaattcaataggtgatggttttgaggcctgacatgtccaacaaggcctttgtttcatcctcccaaatactggctgggtaaaagactctatgttcaaaatacttttcctgagaactgtgaagatactcttccataatcttctggccttcagggttgctgatgagaagtatggggtctgcttcataattcttttgtggaagtgggaaaggagtttccctttagggacttcactgccatcctgcactgtgttttgttttattctttttccctttctgtgcttgccaaagggtacctgggccactgccctgctctgccctccaaaaccaaagcccgagccaaatcttagctcaccagtccctacccagagggatactaaccacttcatttggagatatcttctccccatctgggtctggggatgactgtcttgtgtagccagtctgcgagtatgagtggagatggaaccagagtcttttgattagtttctytgctgtccaccccaccaccattccagtccctcatccattctgctctgagctgggattttctagcatttggttaggaaaactggtcctcacatcttcagagggcccttcttcactcctggtggtggtggtgtttgtatatctgacgctactacctaccttccctagaaattgctcattgtttcttgcccaccaatggcaaccttccccctgctactcatttgcttggtgagtaattattgagtgccccctgtatgccagatggtgtgctaggcaccatggttatagtggtgacccggagagacacagtatctggcctcgtggactttacagctcagcaaaagagggatcttaaaccaataatcactgaaatatatgggcacaagttgggaaaagtgctctgaggaaaagcagatggtgytgagcgctaaggagggcctcctgagcaagtgatgktyttaggtgcatcttagctgaggagaagggaacaggcatgtgaagagtggaaagaacattccatacagtgaaaaggctctgaggcagaatgagtggagagaagaccaggctgtccagaatgtggtgaacgaggggagagaggaggggcaggcagacccttccccatcatatgtcgaggttacccgacctattccatgaaaggcacaaccacaaagagaaagacaagctgggtcctgctggagacaagcctgcacttgccatttttttgttttgttttgtaattttattgaggtacaatctatatgacataaaaatcatccattttaagtgtccaattcattgatttttcataaatgtactgaattgtgcaaccatcactataatccagttttagaacagtttgccaccccagtgagatccttcgtggtgtttttggttaacgtcttcacttgcaacatgcactaatgtgaagtgacctttcccttctaggtcttgcaggtggaacagatrtgcccttttcagaggttgtgaagttagctccaaatcccagactagctgctaccccaagcccgggagcttctcaggtgagagaccatcrgaatttgtttgtarcatttgcattatgaaagcccgctagggttttttcccccaccaaaaggtcacctacattgaacgtgatgtgctcaactaaaggagaaattctgctttattgaaattatcaagaaaatggagctaaagggccatgttgtcagctgcaagtcacagatactgctgattttacagccagggtcagatggattgctgggcatatttgtattgcttcttatgcctcacggtgggcccttccatgtcactgggctataaaagctactgaaaggatccatcactgaaattcaagacatgctgggtttctagcactgaaatctcaagtctagacccaagatagctgtgcagtcacccaggccaggaaatccctgtgaaggcagacctcacttgttgcaggttgggtccctcagaaagcagagtctgagatgtcaactaagatatatgaggtttatgggagtcgggggagttgctcttggaatccacaactgcagaaaggaaagggagtagacaggattggacagagggagaaggtgagcagcaatgcaatttctggagcctaagctattcctacagaaagctccgaagctgagatgacctttagagttttacccagttggtctaaggggctgggcctttataccccatgtcaatcagtcatcacatgtgggccaccccaggatgsggtgaggcagctctttatagctaaagcagtctccaaagtgggctgtcagctgagggctctctgccaacagcactcccatcagttgggagaataagttcttcattcccgaggtgaatctggatggcacaccayagcatccgccacaccactgcacctatttacagaagggtctggcagcccagcagcaggggtgggtgcatcttgtaaggaactgtgaagggtctgagatttacctgacttgcaagctaacaagtgagcctgccaccattttgtagcggcaggcagaagacacgggactcctggatcagagacaaagggctttattatgatgaaccatgatgaactcatggttcatcaggaagcatgagcttcatgcttgcctcattttcccttggcccccaaattccacagggtgatgcaaagtgggcccaggtggatactggcacataatagtctgtgatacaactaaatgatcccgagcatagaaaactcccaaccttgtaaagaaactgcgagcaaacctgtctaaactttgccaccaaaggagacattatcctttttattcttgtcagcaaacagataaacattctctccagtgtctctgccctggagagagacactatctttatgtctctatactttacaaacatccttgaaaagatggtctgaaacgaaagctgtcataagacatgtagaaacactatggagaattgtctcccagcatatcttggaagcaagagctcatgctgtctagagcagacaaaccacacacataggtgtgcccaagcatctgtaatttttctgtttgtgagaggctatttttctctcatgttcgagaggccactcgatacactggaaagattcaatgtcgagataaaggacatttaagttctgattcttattctgcttctccttcaccatgagaccttaagcagcactccttgtctccagacctctgtttgtttatctgtgaagtgggcacaccatctgtcctgcctccctttaacttgctaattgtgaggcttaaaaagaatccttgaccaaaatggctttataatctaataggaaatctgggggtagaattggttcagtrgttcaacatgagaactctggtcatsttccctgcaattccttaggtcagcagtggacaatgggaacataatgtgagccacatatgtcatttaaaatattcggttgcctcattttttaaagtaaaagtaaaaataaaaataaatgattaaaattaattttaatacattttatttaatccactatatctgaaatattgtcatgtcaacgtgataaattwgaagttactaatgtggggccggatgcagtggctcacacctgtaatcccagcactttgggaagccaaggtgggcagattgcttgagcccaggagttcgagaccagcctgggcagcatggcaaaaaccgtgtctctacaaaaaattaaaaaattagctgggtgggtatgtgcctgtaatcccagctactcgggaggctgaggtgggaggattacttgagcccagaaggtggaggttgcagtaagccaagatcacaccactgcactccagcctgggcgacagagaccctgtctcaaaaaaaaaaaaaaaaaagttactaatatgatattttacatttccttttttgcatgaagcttttgaaatttggtgtgcatttaacacttatagttctgggcatgcttcaagtatgcaaaggtatacatggcttgcagctactgtattggataktgcagctctggatgtgctccacatggtgacaggacagctatagctgccccaaacatcatgtcttcacagctgtattcgaaggcagggatcagaaggtgacattgggcagagagtctctcctcacacacctcttgctcatcagggagaaaaatactggcctatccctcccctatcccacacacgcccaacaggctaccacttggtcatatggtcaattctggttgtaggaaagkctagggtagggtctggctctttcattctatctagaaggaggccagcaaggaggaagataaytggggaaagttttagggcagcacagcagcgtctgcctcatctagagtacggagtggccaatcctctgagctgtatgtgcctcatcactctccctggcctgcccatggccgaaatcactgacaactcatggaaccctttaccattggatccaaatgtaacctcaaaagcccacccaacagcaggttgcaagcagtgacagtctatatgattgtcagcgtatgtgacttatatgcagactgaatttgtggactagagttaaacttcttgagagcagggccacatccttcattctctctgtggcacctacagcactgcttgtgctcaaggggaaactcaaagcagtaagaatgttttctcccttagctcagctgaacgttgcagtttctccatgaggagaaatcaaagccccttagctttgttctctgactccttaatgtccaatacaggctaggacaaccttaggcccctcgcctgtgggcctctttataaagggtcacctgttatcttttgctttattttactcatggggtctattcccaagtacttcacaaacacataattcacagggtagaaccagaacatcagctgtgtcaccctcatttggaagagcaaaggaatttatctccctaagcccttctaggcagcacagacttatcgtggactcagaagccagcaggctccttctctctggctctgacaccctgtgtaactgtccctgagccttctcagacagagctgctccagctgcaccaagagtaggccccagttgcataatcagttgttaaaatacttggcttccagctgggcgtggtgactcactcctgtaatcccagcactttcggaggcygaggcggatggatcacatgaggtcaggagttagagaccagcctggccaacatggtgaaaccccatctctactaaaaaagaaaaaaacacaaaaattagctgggtgtggtggtgcacacctgtagtcccagctacttgagaggttcaggcacgagaatcacttgaaaccaggaggtggaagcttcagttaatcaagattgcaccactgcacctccagcctgggtaacagagtgagamcctgtctcaaaaaataaaaaaacaaaacttaactttggagcaaattaaaccaaattaagaaggaatggggttggcatgagctcctacttgtgtttacttgcgagtcgcaggaaaatccgggtccttggtcttgttgtttgtctgtaagacagcgtgtgcttgcctgaagtgcatctgcatttctcaggtaagatggacagccacagggaaaactgcttagggggataaaagaagagtaagaatgtggggttgtgtttctttttggtcttttttctctgttgggctttttgtttatttattttggcttataatgcagcacattgtatatataattttgtagcttctttaaaatttctacattacaaaataaatatttcattcttaaaaatgtatgtgcataccatttttaatgactgtataatattctatctgrgtagaccaggcacggtggctcatacctataatcccagcactttgggaggctgaggcgggaggatcacttgaggccaggagctggagaccagcctgggcaaacatgagacctcatctctttaaaaaaaaaaaaaaaaaaaaaaagctggcagccaagatggccaaataggaacagctcsggtctacagctcccagcatgagcaacgcagaagaygggtgatttctgcattttccatctgaggtactgggttcatctcactagggagtgccagacagtgggcacaggacagtgggtgcagygcaccgtgcgcaagccgaagcagggcgaggcattgcctcactcgagaagtgcaaggggtcagggagttccctttcctagtcaaagaaaggggtgacagatggcacctggaaaatcgggtcactctcaccctaatactgcgcttttccgacaggcttaaaaaacggcgcaccaggagattatatcccgcacmtggctcagagggtcctacgcccacggagtcttgctgattgctagcacagcagtctgagatcaaactgcaaggcggcagccaggctgggggaggggcgcctgccattgcccaggcttgcttaggtaaacaaagcagccaggaggctcgaactgggtggagcccaccacagctcaaggaggcctgcctgcctctgtaggctccacctctgggggcagggcacagacaaacaaaaagacagcagtaacctctgcagtgttaaatatccctgtctgacagctttgaagagagcagtggttctcccagcacacctctggagatctgagaatgggcagactgcctcctcaagtggktccctgacccctgacccccgagcagcctacctgggaggcaccccccagtaggggcagattgacagcccacacggccgggtactcctctgagacaaaacttccagagaaatgatcagacagcagcattcgtggttcacgaaaatctgctgttctgcagccaccactgctgatacccaggcaaacagggtctggagtggaccgctagcaaactccaacagacctgcagctgagggtcctgtctgttagaaggaaaactaacaaacagaaagacatccgcaccaaaaacccatctgtacatcaccatcatcagagaccaaaagtagataaaaccacaaagatggggaaaaaacagagcagaaaaactggaaactctaaaaagcagagcgcctctcctcctccaaaggaacgcagttcctcaccagcaacggaacaaagctggatggagaatgactttgacgagttgagagaaggcttcagatgatcaaactactctgagctacaggaggaaattcaaaccaaaggcaaagaagttaaaaactttgaaaaaaatttagatgaatgtataactagaataaccaatacagagaagtgcttaaaggagctgatggagctgaaagccaaggctcgagaactatgtgaagaatgcagaagcytcaggagccgatgcgatcagctggaagaaagggtatcagtgatggaagatgaaatgaatgaaatgaagtgagaagggaagtttagagaaaaaagaataaaaagaaacaagcaaagcctccaggaaatatgggactatgtgaaaagaccaaatctacgtctgattggtgtacctgaaagtgacggggagaatggaaccaagttggaaaacactctgcaggatattatccaggagaacttccccaatctagcaaggcaggccaacattcagattcaggaaatacagagaacgccacaaagatactcctcgagaagagcaactccaagacacataattgtcagattcaccaaagttgaaatgaaggaaaaaatgttaagggcagccagagagaaaggtcgggttacccacaaagggaagcccatcagactaacagcggatctctcggcagaaactctacaagccagaagagagtgggggccaatattcaacattcttaaagaaaagaattttcaacccagaatttcatatccagccaaactaagcttcataagtgaagaagaaataaaatactttacagacaagcaaatgctgagagattttgtcaccaccaggcctgccctaaaagagctcctgaaggaagcactaaacatggaaaggaacaacctgtaccagccactgcaaaatcatgccaaattgtaaagaccatcgaggctaggaagaaactgcatcaactaacaagcaaaataaccagctaacatcataatgacaggatcaaattcacacataacaatatcaactttaaatgtaaatggactaaatgctccaattaaaagacacagactggcaaattggataaagagtcaagactcatcagtgtgctgtattcaggaaacccatctcatgtgcagagacacacataggctcaaaataaaaggatggaggaagatctaccaaacaaatggaaaacaaaaaaaggcaggggttgcaatcctagtctctgataaaacagactttaaaccaacaaagatcaaaagagacaaagaaggccattacataatggtaaagggatcagttcaacaagaagagctaactrtcctaaatatatatgcacccaatacaggagcacccagattcataaagcaagtcctgagtgacctacaaagagacttagactcccacacaataataatgggagactttaacaccccactgtcaacattagacagaacaacgagacagaaagttaacaaggatacccagaaattgaactcagctctgcaccaagcggacctaatagacatctacagaactctccaccccaaatcaacagaatatacatttttttcagcaccacaccacacctattccaaaattgaccacatacttggaagtaaagctctcctcagcaaacgtaaaagaacrgaaattataacaaactgtctctcagaccacagtgcaatcaaactagaactcaggattaagaaactcactcaaaaccrctcagctgcatggaaactgaacaacctgctcctgaatgactactgggtacataacgaaatgaaggcagaaataaagatgttctttgaaaccaacaagaacaaagacacaacataccagaatctctgggacacattcaaagcagtgtgtagagggaaatttatagcactaaatgcccacaagagaaagcaggaaagatccaaaattgacaccctaacatcacaattaaaagaactagaaaagcaagagcaaacacattcaaaagctagcagaaggcaagaaataactaaaatcagagcagaactgaaggaaatacagacacaaaaaaacccttcaaaaaattaatgaattcaggagctggttttttgaaaggatcaacaaaattgatagaccactagcaagactaataaagaagaaaagagagaagaatcaaatagacgcaataaaaaaaataaaggggatatcaccaccgagcccacagaaatacaaactaccatcagagaatactgcaaacacctctacgcaaataaactagaaaatctagaagaaatggataaattcctcgacacatacaccctcccaagactaaaccaggaagaagttgaatctctgaatagaccaataacaggctctgaaattgtggcaataaccaatagcttaccaaccaaaaagagtccaggaccagatggattcacagccgaattctaccagaggtacaaggaggaactggtaccattccttctgaaactattccaatcaatagaaaaagagggaatcctccctaactcattttataaggccagcagcatcctgataccaaagccgggcagagacagaaacaaaraagagaattttagaccaatatccttgatgagcattgatgcaaaaaccctcaataaaatactggcaaaccaaatccagcagcacatccaaaagcttatccaccatgatcaagtgggcctcatccctgagatgcaaggctggttcaatatatgcaaatcaataaatgtaatccaacatataaacagaaccaaagacaaaaaccacatgattatctcaatagatgcagaaaaggcctttgacaaaattcaacaatgcttcatgctaaaaactctcaataaattaggtattgatgggacatatctcaaaataataagagctatctatgacaaacccacagccaatatcatactgaatgggcaaaaactagaagcattccccttgaaaactggcacaagacagggatgccctctctcaccactcctattcaacrtagtgttggaagttctggccagggcaattaggcaggagaaggaaataaagggtactcagttaggaaaagaggaagtcaaattgtccctgtttgcagatgacatgattgtatatctagaaaaccccattttctcagcacaaaatctcctaaagctgataagcaacttcagcaaagtctcaggatacaaaatcaatgtacaaaaatcacaagcattcttatacaccaagaagagacagagagccaaatcatgagtgaactcccattcacaattgcttcaaagagaataaaatacttaggaatccaacttacaagggacatgaaggacctcttcaaggagaactacaaaccactgctcaatgaaataaaagaggttacaaacaaatggaagaacattccatgctcatggataggaggaatcaatatcacgaaaatggccatactgcccaaggtaatttatagattcaatgccatccccatcaagctaccaatgactttcttcacagaattggaaaatrctactttaaagttcatatggaaccaaaaaagagcccgcatcgccaagtcaatcctaagccaaaagaacaaagctggaggcatcatgctacctgacttcaaactatactacaaggctacagtaatcaaaacagcatggtactggtaccaaaacagagatatagatcaatggaacagaacagagccctcagaaataatgctgcatatctacaactatctgatctttgacaaacctgagaaaaacaagaaatggggaaaggattccctatttaataaatggtgctgggaaaactggctagccatgtgtagaaagctgaaactggatcccttccttacaccttatacaaaaatcaattcaagatggattaaagacttaaatgttagacctaaaaccataaaaaccctagaggaaaacctaggcattaccattcaggacakaggcatgggcaaggacttcatgtctaaaacaccaaaagcaatggcaacagaagccaaaattgacaaatgggatctaattaaactaaagagcttctgcacagcaaacgaaactaccatcagagcgaacaggtaacctacaaaatgggagaaaatttttgcaatctactcatctgacaaagggctaatatccagaatctacaatgaactcaaacaaatttacaagaaaaaaacaaccccatcaaaaagtgggtgaaggacatgaacagacacttctcaaaagaagacatttatgcagccaaaagacayatgaaaaaatgctcaycatcactggccatcagagaaatgcaaatcaaaaccacaatgagataccatctcacaccagttagaatggcaatcattaaaaagtcaggaaacaacaggtgctggagaggatgtggagaaataggaacacttttacackgttggtgggactgtaaactagttcaaccattgtggaagtcagtgtggtgattcctcaaggatctagaactagaaataccatttgacccagccatcccattactaggtatatacccaaaggactataaatcatgctgctataaagacacatgcagacatatgtttattgcggcactattcacaatagcaaagacttggaaccaacccaaatgtctacaatgatagactagattaagaaaatgtggcacatatacaccatggaatactatgcagccataaaaaaggatgatttcatgtcctttgtagggacatggatgaaattggaaatcatcattctctgtaaactatcgcaaggacaaaaaaccaaacaccacatgttctcactcataggtgggaattgaacaatgagaacacatggacacaggaaggggaacatcacactctggggactgttgtggggttgggggagaggggagggatagcattaggagatatacctgatgctaaatgacgagttaatgagtgcagcacaccagcatggcacatgtatacatatgtaactaacctgcacattgtgcacatgtaccctaaaacttaaagtataaaaaaaaaaatctggcaaattttttgccagaactgcaatttactcgaacattttccttgccttagtacagttgcttttagtttttcaattataattaagtcttcttagataaaggatttaaaaaaaaaaaaaaccctttcctattctacatgagaatttgacctttggttaactttctagctctgttttccttgagatctcataaaagtggactatcaacggttttactaggcaacattgcttatgtaaaaatggcctttgcttgggaaactgcatctgaactgagaaaaccataactacctggtgagaagtcttcctcagggcctccttgagtgcagtgactcctcctggtcctgcctcctacctamtaagttgttacaggagatacttttgtagggcatatgaggttttgaagccagggtcattcttttgtctgtatgatgtggatctcaactcttttttttttttttcttttttttgagacagagtcttgctctgtcacccaggctggagtgcagtggtgcaatcttggctcactgcaacccccggctcccaggttcaagtgattctcctacctcagcctctcgagtagttgggattacaggcacctgccaccacacccagctaatttttgtatttttagtagagacggggtttcaccaggttggtcaggctggtctcaaactcctggcctcaggtgatccacccgccttggcctcccaaagtgctgggattgcaggcatgagctaccatgcccggccagatctcaactgtttgtgcctgggctgtaacctggttgggaggcaaagagaccctctcctggacagctgtgtgaactgctgtatggactgctacatggtcttccattgagaggagcacctcctgccactgtgtttctccaggctgtcttcccttggctcatggtggtcttataagtctgaatgtttagtggtatcaaagaagacccttggtggacttggcatcctacatttaggattatttccttaggagagcttcaccaaagtagaataactgggtcccatactatgggctccttaatacagatataaagtcaagtctatttcccaaagagttgtatcaccagctttcaccagctgtgcaatgaggcagccatttctaggtactctcaccagaatttttttgaaattttgtagatttgatcataaaaattggtttcttgtcataatttacagttttaaaaaatcttaaactgtaggtttgagaactgctagcatttcctcttttgtgaattgatgctttctttcgcccagaaaaaaagttaaattgcaagtaaacgggatttaaaaattttaaattgcaaagtgcaaccagatgtaagaggcattttccccctctgttctaaactgctttttctgcccttctaggtctacgaggcccttctcccccagtatgccaaactcgagcagagaatcttgtctcagacccgggggcctccggagtgaacaggcatccctgttgcccctgcctgcccagatttactgaccccatttgtcgacatggccccagacaggagggatccacttctctgttctgaacagctcttcctgcccctactgactccttggagtgtccaggaccatcttaaagccgccctcagcacatctgcatgaagatagataggcactcctgtccctgtgcccgtgtgccccagggcaggaaagcatctctcttttcctgtcttttatcccaggaggcaggacaacactgagactgggatatgtccaataaaaactatgacttttccccttgcagaggcagaattaaagctaatctagggactcaaatcagcagaatgggggagacaaagcccggtctcaccccctaacctcatcctatctctttctccaaccctgactgcccactcctccrcaaaccgtgacccatagccgcccccaccccataccttgatctaccatccatcctcttccccaatccaaaccccacagtctcttctctcccacaccctgccctccttgtttcagctgtctgaggtgcctcgcagggcctctcttacttgccccatgctcaccctttccatgctgtccccattctctcctttcaccatctctcctctccccctccttcatctctcctccctccccaaactcacttggcataattcacaacctcccacccaaacaatgggcctggtggacgtgcttcctgtgccctccctttagctatgcccacagatcactgagagggaccatctcccaagtggtgcagtttagaacttctctccctttttctccctcattccctctctcttcttgcagtccacttgctgaagaagttgtgtcatttctctggaagaatttccaaaattctggatttcttttttattttggagtatttcatcagctgaaaagtgattctyactttgagttttcttcctatatttgtatagtgagttcctttttccttcctctttatccctcctgttttactttatacctctctattccttgctcaaattattgcaaaagcctctatagaaagtcctctgtgatctgactcctgcagactcttccagatttttctgcccaaggcctttactgagctcaggactccagctaaatcaaaatackcatgttctcacccagagtgacaaaatcctgcagataggtttaagacctagtggmtcagagcagtagctactgggaagttaaaaggaaggggcttagaaaatgaatgggaccaaaggcatcacttctgatggagatgaagccatcttgaaagtgagtggtgtcctttggaggcatggtggatgaaaggcgcaaaggaagcaagaggttaaagataatggcccattagatacaacagcaagcccaagattccraagaagacagacaactccccctagtaccacctagacattactttttaaagacattttacattattgtccagcagaaaaaggctgtcttggaccatgaaacagtaaactgtaactaaacacttcaacatgaatttgaaaataaataattgtggatataaaagaacaccagagatcagaaattcaaaaactcagaataaaaatgaaaaagctacaagcatatatgagaagagaactgactgaacttgggaaataatttgaacaaaaagataaatcttcacagatatgaatactaaattatatcttaatgaaaatagatatggtcacaagtacattaaggcacgtagaaggtaggagtaagaaaagctaagagaagcaaaacaaacaaagcaatattaaaggaagagccaaaaagacccagaaataaaatgacagataaagaagattgtcaaagaaaagatgatacaggtaagattggaactcatgaagacaaaagataagacagtggcatagagttaatatttaaaattcaaatattaaaactcaaataaaccccaaagaacttttggaaaacaaaagaaaaccttaaactttatcttgaaagggtctatcttgttacttagaatattgaatcagaatgattagctctgagacatagcctaccaactatactttgaagccaaagaaaaagaactatgtaagcctctaggccaaaagacctagtctcttacaaaggaaagacctggttggcctcaaacttctcaataaagcaagatagcaatggggcaaccttttcaagaaactcaaagtatgaactgaggatttcatatttcaccaagctgtcctttaagtatcaaggatataggaagaagttttaattacacaagagcccagggactattatactcacaacttcttccttagaattctactaaaagacaagcttcatccaactagatgattggggaaacttgagcaaaaggactggacatgaccattgaatatctttgtagatctgaggccaaatggaagtggggataagggtggaagaaccgtattagtcccttctcacactggtataaagatagtacccagctgggaatggtggctcatgtctgtaatcccagcactttgggaggctgaggcaggaagatcacctgaggtcaggagctcgagaccagactggccaacatggtgaaaccccgtctttactaaaaatacaaaaattagctgggtatggtggtgcacgcctgtaatcccagctacttgggaggctgaggcacgagaattgcttgaacccgggggcagagattgcagtgagccgagattgtgccacttcactccagcctgggcaacagtgagactctgtctcaaaaaaataataaagatagtacccaagactgggtaatttataaagaaaagaggtttaattgactcacagttccacatggctggggaggcctcaggaaacctacaatcgtggcaggaggtgaaggggaagaaaggaccttcttcacatggtggcaagaaagagagagcatggacgcacaagagagcaagcagggaaaactgtcttataaaaccatcagatctcgtgagaactctctatcatgagaacagcttgggggaaaccacccccatgatccagtcacctctcaccaggtctcgccctcaacacctggggattacaattcaagatgagatttgggtggggacagaaagcctaatcacatgaaatagtatcaaactatatatgctttgacaagacagaagtaacaaaacaaaaaagaagggagagaggaagaggaaaatacaaagaactccttgttgcttaggcaatatgtagaagtcaaatagtattatttaaagttgacaaaccaagtatatgaagtgtaagtaaggaaaaagggagatttagagcattaaaggtgtactatactattaatagtatagaatacatagtataattactagaataaaaatgtaaatcatcaatgctcaaagaagcaataataaagattacagtgaaaaacatgcagtaaatgtaccatcatacagtaaatatattaagtccaagcatataagttaaatcagtacatgtgaaaggacttacctattaaaaggaatatcagattggcttacaaaccaatgtcttattgtctgttatttataagagacacatctaaagtaagtgattcaggagaggctaaaaaaaaagagatgggcaaaaatagaccagacaagtaggaccacaaaaggcaaagattacagtatccatatctgaaaaggtagaattcaggaaaaaatagacaagacaatgaaggatacattaaaatgctaaaagccacaattcacaaggaggatatactatttatgagtgttagagcttcagttatctggtttgtcaactttaagtgatattctttggctcctgcctatcccctgtacaacaaagagctctttctactttcctctttctctctccctcctttttcattgtttccgttgtgttacttctgccttgtcaaagcacataacatttgcataacaaattatgcaaggaaaaatgaatagaaacctagaaataacagagaaatttaaaacacctctctctcatccaagactgaagttaagaagacaaaaaatacatataacgatataagtgatctgagtaacagtatctataaagtagatctaatgaatatatgttgaactttctaccttgataatagagaatattactctagggcaagcgtgatggcccacacctgtaatcccagcactttgggaggctgaggcaggtggatcgcttgagctcagaagttcaagaccagcttgggcaacatggtgaaaccccatctctacaaaaattagccaggcatggtggcaggagcctgtagtccctagaaatttatgactcttctaggaatcaagattgttgtcccacagcagcctcacacacctggcatagcagtgattaaactcattgggagctatctcaaaaataattgtgagtgaggcttttggtacatagagtagactccaatcagacacataaagcccacagtacattttaggaagctatactaatggcattaacctggattaaaagggactaaatgttaaaagaccctggacccccaactttctatgggcaacaagcaggcatagttgctcaaaagacagtttctagcccaggcatagtagctcatgcctgtaatcgcagcactttgagaggccaaggcgggcggatcatgaagtcaggagttcaagaccagcctggtcaaaatagtgaaaccccatctctactaaaaatacaaaaattagctgggcatggtggtgcatgcctgtagtcccagctacttgggaggctgaggcaggagaatcgcttgaacccgggaggttgaggttgcagcgagctgagatctcgccactgcactccagcttgggyaacagagtgagacttcatctcaaaaaaaaaaaaaaaaaagtatatatatcaggccgggcgtggtgtctcatgtctgtaatcctagaactttaggaaaccgaggtgggtggatcacctgaggtcaggagttcaagatcagcctggccaacatggtgaaaccccgtctctactaataatacaaaaaaaattaggcaggcgtggtagcagacgcctgtaatcccagctactcaggaggctgagacaggagaatcacttgaacctgggaggtggaagttgcagtaagctgagatggcagcactgtactccagcctgggtgacagagcaagactctgtctcaaaaaaaaaaaaaaagatatatatatatgtatgtatgtatctatgtatcagaaaaaaacgcaagtacactttaagcatattttaaaatgcttactgacaaaaatcaaagagtttgataaaattctgtgttaccatggctgtggagaaataggcattcgtatacatttctggtaggagtgcaattttgtgaaactcctaaagggggaaattgggcaacatcaacaaaactaaatatgagtatgacttaaccattccaataggaatctgcacaaagacacaattccaacatacaagacaacatatgtataaggttattgtgaaattattgataacagcgaagtacttgggaaaaggcacatatacattaatataggacagattgaatagattataatgcatccacacaataaaaaagaatgaggaagatctctatgtaccaatgatgggtaaattccataaacaaaggacagttctctacttagttctttttattccacttaacaaagttttatagtttttagtgtatgtcttacacatattttgttaaattatttgatatttcaaaaatgttttgtgataaaatgtgtgacatttatcactttaaccatgttttgtgataaaatgtatgacatttatcattttaaccatggaaaagtgttcattttttcaattgtttttgctagcatttaggaatattccatggtatgttgaattattcattgtgaacatattaagatcaaattcagtagcattaggtatattaccaatattatgctaccatcaccaccacacatttccaaaacctttttatcattctagactgaaactctactcactaaacaataactcctatttttctctccccagcccttgataaccgctatcctttctgtctctatggatttgcctattctaggtttttcatataagtggtatcatacatgtttcctcttgtttctggcttattccacttcgtgtgatattttattaaattttgcatgtgtaaaatagttaatattttaatgttttaaatttaaaggttcattcacattgtagcaaggctgaataatattccgctgtgtttatataccacatcctgtttatccattcatccatcagtggacatttaagttgttttcaccttttggtgattgtaaataatgctgctatgaacattgatgtacaaatatctgagtccgtgctttcaattttttgggtatatacctagaagtggaattgctgaatcatatagtaattctgtttaactttttgaggacccaccacagttttccacagtagctgcaccattttacattccccagcagtaatgcacagggatctagtttctctacatccttgtcaacacttgttatttttctttatatttatatatatatatatatatatatatatatatatatatatatatatatatatataaaatagccatcgttatggatgtgaagtgaaatttcattgtggtttttatttgtgttttcctaatgactagtgatgttaagcacttttcatgttcttatttgccgtttgtacacatttaattgttttgatgctgttggaaaagtgtttcattttttcaattgtttttgctagcatgtagagatagtctatggtatatggaattatttgttgctaacatataaaaatcattttttttttagatggagtcttgctctgtcgccaggctggaatgcagtggcaccatctcggctcactgcaatctctgcctcctgggttcaagcaattctcctgccttagcctcccgagtaactgggattacaggcacccccaaccatgcccagctaatttttgtatttttagtagagacgggatttcaccatgttggccaggatggtctcaatcccccaaccttgtgatccacccgcctcagcctcccaaagtgctggaattaacaggcgtgagccaccacgcccagccataagaatcaatttttgtttgattttgtgtcttgcaactttattaaattcacttactagttatggtagtattttgtattagtaggatatgtagggtttctatccatcatgtcatgtcatctataaaaacaaagacagttttcttctcttcaatctgtaagcattttatttcattttcttgcctttctgcaatggctagaatgtctagtatagtgttgaatagaagcagggagagcaataatccttgccttgttcctgatcttagcggacagcattttatcactaagagtgtgtgtgtgaatacgccctccatcgggctaagaaatttccctttcatttcttgctggaggtggggaggaatatttaaaaagaatgtgtaggtttgtcttgaattttgttaaatgttttgcatgtatgtgttatggttttggtattatgtgttccttaaatatttgattgaattcaccagtgaaaccatcttagttagatgttttctttgtggaacttttaagtgaaaactcaatttacataaaaatatatggcccttcagattttgtacttctttttgtgtcagtgttaataatacgtatctttcaaagaatatcccccttttttttttggtagagatagggttttgccatgttgttggtagcaagccctaaccctgtcataaacaggccttaaataaactggccataaacaggatttctgcagcaatgggacatgctcatgatggctgtcatgcacactgcgaaaagttgttggtttactggagcagggcaaggaacacctggccccgcccggagcaaaaaactgctcaaaccacaa

SEQ ID NO: 96122 - DNA, 45903 bp, Homo sapiens
  misc_feature (1)...(45903): n = A,T,C or G
cccctactccaagactggaccaggacccaggagcatggcacaaccaagaaaagattggacatggccagagaagggcagtctcctgagtgtctgtagctgaggtcagtattcctggttctgcctgcagccctgcttaggactgaacctgtgaggagggggcccagctttcaggaagcccgtgccaaatccaggctggaacccacccagtggaccagcttctcttacccacattactgcttccaaacctcttccactcaacacacacacaagtttccaaggtagaatattatttattattataaactcaggatgcaagatatattccaggatataggaagaatggcaaatatcggcttttctcagatatctttgaaattattttaatgcgtacaaaacatgtagaagatgcctcttgagatggctttaaaatgcccagtattaaagggggacaggtgcatggcagctaaatgcctcaacaagatcatgcagagaggggcatccattccctcccaagatcctaagaaaaggtaccttgctccagcctggctgaaagtggagcaaagatatgcattttctattggatttagggtcctagggtctgtcctggggcacagacacctaagaccatggcaccttctccccagagkacagcctgagggtaaagtataaattgctctgggaaggagagagggagagaacagctgtgtctgcagttcattgttgtgtgagtttaagcagctctcttcctctctctgtgcttcattagaggtataaatactggtacattgggtcctttccagagtttggtttcaatgagtagggacacaagagaaaaggaatagatgagtgcccaatttttgttcagggacatggttaggctccctcagtgatgggactttcccacctagctgttcctgggagctgtacctagaaaaacgtgtgtatgctggtgcctgtgtgtgtgagagtacatgtctgtacatatatgtgtgtgtctgtatgtgagtctgtatgtgcccatgtgcccacaagctttggggcaggaggcttttatatggtcgctgtttgtaaacaaataactttgtaaggcaatcaaggtacaaagttggtgggaaagctctctgcaggtggcccagggaggaaggctccctgctcacatcattacagtgactcatccccagaactcatacttgatgaatatgccagaggccaggatcccttctcatgccaggtggagctgagagcatgaccacaggcatcctgacaggtggaaatgaaaagcagcccaagctgctcaggcgagtctcttggggacttgtcactgctgaaggttgggcagaagctgggaggtgtgaaagatgcagatgagaggtggacccattaggaaataaggctcaaggtggggtctccttgggctgggccaaactgcttccccacctgccctgtggggaaggaggaagtggaatgggcggtgtgcagaggcactgaagcatcagtaggcatcactgtggaagaagctgccccagcagtgtcgtggtcacagcagtggccagcatgtagtccagcaacagccagctctcccgcagccaagcctggtctcccccaggagacccagagctatgcttcaccatttcctacagggattcaaacacagctactctctgttctccccatcccactcctcaagtgaggaaactgagggtgaagatgtgtgaatggctcagagctgagctggctctgctggtccttcttagtctcagctggtcctgttctatagtgtcctggctgataatccagcaagtggacatgccactcacagccactggttccatgcaggacatgaaatgtgatgtccagctgctgcagacgtgtctgtgaagttggcatctccaggaattgagaggtaagtagagcacagattcctcctacaacgaaaggaggaggcagggcagaagtacatggacaggcagacagatacacacacacccagggcctcagaacagtcttcagggcagggacaaggccttggcaaggcgagtccagaaccaagatttggtgcaggggttggtgtagtcgcagacagtgatgaacctcaggatgctggggaactctttcttcattgccttgtacttgatggggatcagtcgcttctgatgggcacctgcaagccaaggggtgccatgctggcatcaggcccttgccccatggtgggacaagcccagtcttcaaccccagggttaacaacagccatcccccatctaagtacccctggcacacattcactcacacaaaaaggcacacacatgcacacatgctcaggtgtgcagagatcttcagcagttctttggtactgcatccacagtccttggggagggaaggctgacaatccagaggccccacctacacattccctcattctcttgccagagcagggttgagcttacctggagagaggctgagtgcaaatttggtctggaagtcacattccttgctctgcaggtaatcatcagagacaaccaccaccatccggcggcacctaggggagagtgggcaggctgcaggtcctgtggcaacttagttcagcatatcccctgggaatagcttcaggaagggcccactgtgcccaggctggacagtgcacagctagsaggagatgcccagtatctggaccccagggcagggcttcatgcatccacgcacccaccccgtggccttctagccaacctcttttcgatgagctcactagcaatagaccagacacaggtgccaggcaggacatcgcggtcagacacacacaacttcagtcgatagtttgtctgttccagttgccggatcatctcctgcacaaactggatgtcgctggggcaatagcagatgaaggcatcgaaacgctcaggcatatgccctgggtgcagagcacaagggtggtggtcagagctccatgggaaggcttgggagggatccagccaagagtcccctgcctaggcaaccctgggccctgcacccttcccaagatgatactcctcagagaaagtgccctttccaggagaggaaagatgagtacctcaggggctaagctctggattaaccacgagacagacattatttcatgagcatctcacagcaatccagaggtaggactattatctccatttcttaggtgaggaaactgaggctcagaaagattaagtgacttgcccaaggtctcacagcccatctgcttcaaacacccatgctcttaacaccacaatgtcctattccacctgtcccatgggaacagtattggacccttacccagggggtcatcaagtgtggtgatgcccgccagctctgctgtccgtgggacactgctgtctacagcggccacctgtaaaggcttctcagcctcctcctgctgctgcttcaagatatacttttggcaatcctcctctgtggggaagagacagagtaaagcagcctccctgggagtgcctacctctttacccacagtcaggatccagccgctgtcccacctcctctggctgggttgttctagagggcttccccagttcactggtgccacgcgaagctcaacggctctgagaagttgagctcccactggctctaactgacccaaagggatgtcagtggtgttctggctttctggaaggccatcaaagtcaggtttgtatctctgtcccttcctagggatcctaagaatggtaccaaggtaggtctgcttcttctgggatccagggcagatgtgagcaaggggctgggcatgccagaaaggctcaggagacccactggttatggtgcagtgattccaactcagcaaggtgtgcctgtctgtgggcggctgtatccaacgcctatgcatgtatattatgtaagtgccagtgagtagaaagaagggctgcatttccccaggacttgaggtttctaagacagtccactgtcaatcgccccacctgtcctgttgctctacttgaaacagcccagatgcccccacagaagcctgattctgactcctggccctacctgaaagcctctgcctaagctgcttccttcccatctccgcctatccggacctttctccagtccttcttaataaccgcgaccggttattaagaaggaacgggacccgcatggttctccctctgcaggcttcttcgggcccccgaggcaggaaatggggtctctccatgggagacaggatgctgaggccgcggaaagtcagcctcctcaccccccaggtacgaggccaggaaggggacgtcctcaccaatgctgggtcccagctccagcagcacgtcgtcgcggcccagcttggtaagcagctcgagcagtcggcctacagaggcgccagggcgtccctgccaggcgtccagcakcctgccagtggggtccgcttgtgtctccagttgccggatctccaagtactcaaagtccatctcctccgcmagcgcggtccagtcggccgccacctgtgtccgcacgttcaagaacasakacaggcggcgccgcactcgcatgttgagagcagccaggggaagggaggatgtggaggagaccggggccgcagaccccgcgccgggacctcctgcagccatggcgggcggtcctggagcctcagcgcggtcgggtcgcattgtctgccagcgcttcctctttctcctgcggcacccgccscgccccgccggctttcgctttccgagaagcgccgccctgccctacaatctggagccccgagcaaaagtgcggaggcgggggtgcccacctctacccttgaggtctcgaggcgggtgatgtggggggcgtaagaagtaggaatctgccttttgagatctggagaggtccacggcaccgccctcgagggtctggtgatggtgctagtaggttggcggcggagtgaggacgaccctccttcgggggttgtaggaaacgggccttgctttttgggatctggtggagccacagttcttccacggaggaatctgaggggttcatacggtcctgccctcgaggatggcgaggaggggacaagtgggaaggcaccagctctgccctccactgtctctggggaacacgcaatcctgccagtaggggtatgggaagacccctgctgtgctccccgaggtgggagtgggaaacggacagctgccttctggagcctgaggcatgccgtggccctgccctcgaaatggttggggacgtcatgacactaggttggggagcacaaggcaccctgtcctttggtgtctgtggaaagcccagcactactctccagggtctcaggtgaagacatggccctgctattgggagtcaagggggcacgtggccttgccctttaggtttagggacacagtcctgacctggggagccctggttcattcatttactcattcgacaagtacttattgatcatctactaagtgtcaagggtgtcgcaggctccccggatacatggtacctctctgccttggtggagaccccagcctagcacgggaaatgggcactaataaaatcattccaattgggtgtaaaactggtaaaagtgtgaaatgttcattctccagttagagagcttgtcacaccccgcatgtctgtaaaatctgttctcccggccagcccggaagcccaaattccctgtcttctcgaaagaatgggaaagcccaaccacgtcggagcaggactcgggcgtctcggaagtatttaggtcccccagctcgggtactgggaccggagggatagcagagcctcctaggaagtgggtagaggaattagagcctcggcttccatctccagcccccaagcagtaagcggtcctggctgcccagccttccgtttggctgcgggcaggagacagggatttgggggtcaggtctcgggtttggctrcaaaaggtggaaagacttccggtctgcatttctgggcggggattcgtaaagatacaccttctggttggctgcggtaggccaaggtaggcggggcattgagtggaaagctcggctgggcggtgcctgtgggccctcctatagagggcttggtaggcggtggcggggaggggcgggttcccaggccgactctccttgtggttggctgaggctggaggtggacgggacttttggagggtcgctcgcgtctgttcgcagagctgtgggcggagttgaggccttggaggctgagatgtggttctgcgcgtgtgcggacggctgtctgttaactccgcggtcagttcccggactggtggctggtctgcagggttgacctgcgcaatgcagaggctgcaggtagtgctgggccacctgaggggtccggccgattccggctggatgccgcaggccgcgccttgcctgagcggtgccccgcaggcctcggccgcggacgtggtggtggtgcacgggcggcgcacggccatctgccgggcgggccgcggcggcttcaaggtgaggyccgagggtctgggcgccgagtgtgggaagacgccggcgcgggctggggtccggttcgtatgtttggttatcctggacgccggaggcagctccgcacccagctgtggtcgctttgtctccctggggtgggcatgggggagtgggggtcactgcggctgctctttctgctgcaggacaccacccccgacgagcttctctcggcagtcatgaccgcggttctcaaggacgtgaatctgaggccggaacagctgggggacatctgtgtcggtgagcgaaccactcaggccctgcgctgggccttccccgttcttccgttcgtccagagctctcctcacctccccgccccgaattttcactgggggaacctccatggccttgacctttgaaggggtcctgccccttcacacctgtgggtatttctcgtcagatgggaggagagactgagaaaagaaataagacgcagagacaaagtgtagagtgggcccaggtgaccggcatcggtctccgagttccctcagtatttattgattactattttcactatctcggcaaggggagtgcggcagtgtgggggaaaggaagagagatcagactgttactgtgtctgtgtagaaaaggaagacagaagaaactccattttgatctgtactaagaaaaatttttctgccttgagatgctgttaatctgtagccttagccccaaccctgtgctcacagaaacatgtgctgtattgaatcaaggtttgagggatttagggctgtgcaggatgtggcttgttaaccatttgtttgcaggcagtatgcttggtaaaagtcatcgccattctccattctcgattaaccaggtacacagtgcamtgcgaaaggccgcagggacctctgcccaagaaagcctgggtattgtccaggtttccccccactgagattgtctgagatatggcctagtgggaagggaaagaccttacagtcccccagcccgacacccgtaaagggtctgtgctgaggagtattagtaaaagaggaagrcctctttgcagacacccgtaaagggtcggtgctgaggagtattagtaaaagaggaaggcctctttgcagttgagataagaggaaagcatctgtctcctgcttgtccctgggaatggaatgtcttgggtgtaaaacccaaccatacattctatttactgagataggagaaaaccgccttatggctgcaggtgagacatgctggcggcaatactgctctttactgcactgagatgtttgtgwaaagtcaaacataaatctggcctatgtgcacatccaggcacagcacctttccttaaacttacttatgacactgagtcctttgctcacattttttcctgttgmccccctccccaccattaccttatagtwatggtatataatgccacatccctcttgccaagatagtagagatagtgatcaataaatactgagggaactcagagaccagtgctggtgtaggtcctcaattgctgagcaccagtcccctgggcccacttttcttcctctatactttgtctctgtgtcatttcttttctcagtttctcgtctccaccttgcgagaaatacccacaggtgtggaggggcaggccctcttcaggcaaaacggggtgaacagggtgatggtggggagaaggtcagcaggaaaacatgtgagtaaaggaatctgcatcataaataagttcaagggaaggtactgtgctgagatgtgcatgtaggctagatttttgtttctctttacccagacatctcagtgtagcaaagagtaacagagcagtattgctgccagcatatttcgcttccagccacagggcggttttctcctatctcagtaaatagaaccaatagtcggctttacaccgagacattccgttcccagggatgtgcgggaaatagaggccttcctcttttactaatcctcctcagcacagaccctttacaggtgtcgggctgggggacagtaaggtctttcccttcccacgaggccatatctcaggctgtctcagtggggggaaaccttggacaaatacccaggctttcttgggcagaggtccctgcggctttccacagtgcatcatgtccctggttaatagagaatggagaatgacgatgacttttaccaagcatactgtctgcaaacatatgttgacaaggcacatcctgcacagccctaaatcccttaaaccttgattcaatatagcacatgtttttgtgagcacagagttggggctaaagttacagattaacagcatctcaaagcagaaacaatttttctttgtacagatcaacatggagtttcttatgtcttccttttctacatacacacggtaacaatctgatctttcttttccccacaatcttcagtccagccctctattccacccctcaccttgaaatacagcaatatgatatggcaagagtcttatccagcggatgccacccctaggtcggcaatcactgttccacctctctggggtgacagcagggctcacaggaggatacctggggagatgtgcattttcagaaactcccatttcacttttaagggcagacaacctgcccatctgtgctgatttggaaaagctgggtgcatgggcaagtgagcgtgggaccctcagggacaggagctggtggatgaccaggacaagctgttgtatggctggctctccctgccccaaaccctgatgttccagagttgcaagtgagcctgccaagggctagtgtcccgaagaaagatctggaatgcctcatctctggttttcacagctatactttagtgcccagaacaccaccgcctggcactgaatgaaagtttgttgtccacaggaaatgtgctgcagcctggggccggggcaatcatggcccgaatcgcccagtttctgaggtaaacttttctagttctagccatgggttggccattttgacactttactgggcccaggccccaggaaactcagtgtgcaggttggggaggataaggttggacaccagaatgaggcaacgagagtccttggctccctgctcttgtggactcaacctctcccctactttgaagtgmtgagccacgatacacaaaacctttgggactggagcagaagttctctgtagcttgatttttagccaaagccaggttgtcatttgccttttgtgagtgtggactctgtcctcatttgtcasgtgagtaatcaagtaagaatgctgaaaagtgactttcagcctttttactagttgagctgagaactccagtcatatcccactagcagagactttgggatagggcagaaccatggggaaggaggaccctcaggaggagacctggtcaactttcctttaagcgcctgcagggtaaagagtgcttaaattattttcatgtgtagatttaagaactgcttggctttgtacttctagatgcataaataaataaataggaacattagctagtgaaggaacaggaaaacaaccctctaggaactgggagaggtttagactgcccagcctgtagttcaaggccccctacaatctggctccagacttaccttccagcctcatctcctagctgcttactcaccttgacttttcttcgttcagccggctgtgggcctactgtcttccctgatatggtcattctgtctccttgaagtgctagccctacctcctctttctgccctagacagaaagacaaaccctgcctaaacacagtctcaccattttggcatgagttatccaggctctcaggctgaaattgagagccccttcctctccagcagtagccatatacttccttgtgatgtggtttgccctcttgccctattatttcagtctctgatagttgattcattttctgtgtgttggttgggcatcctctagggcacagtgttataagcatcgcagcatccctcaggtgatgccttgtggtaagtaggtatttagtgaacacttggtggattgagtgaaggaatggtaactacctgctagggagttaagggaccctggaagggtcaaacaggctgcacaggaggctatccccctgagagagtctctgcagagcctggcctgggcactagttcagaggttcccaactctggctacacaccagaatcaccaggatgcttccactccctcagattctgagtctgtgggtctgaggaggtctggaaatttccctagggctttgtactgttggccaaggcaggttacatcaggaggggaagccctactagcttccagggctaagaccagtatgagagtcttggggaacctaccagagcaatggatgttagaatatatgatgcccatcagagtgcttcgtctaggtgggatcaggctttcaagagtccatgggaacatgcagggttagctatatgattactggtaaggccgagtgktccctggcytcagacttwaggcatttcttttgctctggtgctctgtcccagcagcagttccttttctctgttttttgggggaaacagagatacacagttttcatttctgaatcttcaaagggagagagagagaaggatccctgtggcccaaacaggcttcccttgcctttgggctgtgcttggtctttgattgaagattctcataggartagaagggaatgtgcttgtggggccctggggagcaagtgcctgcagagatggggtctgcccagtagctgctcacccccattccatggatctggcctggcatgggagcagagctgctgggtttgttcccctgccctttacatcccttgaggggggcagttagaagcataggactgctttccatgagagcctggcatggaattgggggctgattctactttctcaccttctgtttcagtgayatcccggagactgtgcctttgtccactgtcaatagacagtgytcgtcggggctacaggcagtggccagcatagcaggtaagttatgactgggtgggtgccttggtcctggacctgtgggtttgggtcagcaaagtcgctgtctgccgggcaagcaataattaccatttctgaggactctaaccacagaaagagtgcaggagcgccccctaccactgcccaaagccttttctgaacactcctgggtcttccatttctgaggctggggctgagtcccatctagagaccaggtggggaagaggctccactgcttccagaacaggtggactctggcaaaggatgtttatgaaatgcttttgttacaggtggcatcagaaatgggtcttatgacattggcatggcctgtgggtaagaatttttttctgccggagcttattaaccaacttgtgacaataaaactaattttcatctgagttctcagaggccatgatttcaggattccccccatcccctttaggcagctggccacgagtgggttctcacaaatgcaggttaagagtggctaccaactctggctgctcaggaatcactcacacctctcagcactagcaggggaggggaattggcctctaaaagcttactttcttggaaatctttcaggctggaaaaggtgggaaaacattttgagaaaatccagcatttgggtttcctttgggggcccttgttgattcatgatgctgctgagagagaagttgcagtttgggttccctaaagccagggacagcgcctactgtataactagtttgttcattttactaggctgtctgtccctttgtctccccaccttggaaccagtgtggaaacttccagctgcttatgggctatgagggacataattagatctgtggtggtttggtcactgtcaccttcacctagactgtggctccatcattggctgcagcaaatggagctgcagaagttgtatttggcagtgcctccagggraggtcagggcacaggtgcccaggcttgggtgggcatctggtgctgggagggcaggggagtaaggtctttggcaggctgggggaggtgagcagccccagggttctgacatgcctccgctgcctttcacatcctctttagggtatttcttgagaggacscattgctggcccctgtcccagggctgtggcagctgtcactgagttgtaatgacctatgtctacagttgtaaataaagccaaagaccactctgcaaggactttggctgggcaaaggccactgccgtttgatttctctcatgctcttctatcttactgggtgagaggtggcatggataacttgagaagggctggagcttttatgagtttcttagagagtatctgattcccaagcaggttaaggatgatggtactaggatattaagatctgggccaggcctgacacccacatcacaggctgactgttctccatagactttgatcagcaagtatttaacacagggcactctagttggaagtgggctctgggaccagactacctaaatgtggatccaggctgggtcaccatggataagttatacagtctctctagacctcagtctcctgatctataaaatggggatacctagctcagctctgttgaagttgagaagaataaatggagtaatagcaacagtttacactgtggagtatttgtctgtcatgtgactgacactgaagcactctaatatctcaaaagaattcagaatagtgctgggcacgtgaaaagcactcagtcaaggttatctgttatcatcccttgaggtgttagggtcccccatggcctcaaagcccttttttgaccacactacactgccgtctccttcctctcagctcgtagcacttccttgtctatgcaggtctgaatgccctttgagctcagctttgtggttacttttatttttattttatttatttatktttttgagacagagtctcgctctgtcgcccaggctggagtgcagtgacacgatctcatctcactgcaagttccgcctcctgggtttacgccattctcctgcctcagcctcccaccctggcgcctgccaccatgcccggctaatgttttgtatttttagtagaggcggggtttcaccatgttagcctcatgatctgcccgccttggcctcccaaagtgctgggattacaggcgtgagccaccacagccggcctgtggttactttcaaattgtctcttctcccttctgaatttgtgggccctgagggcaggccctggcttgtggatgtgtttcctcctctgtggctgacagcagaaggcttttctctggaattgccagttggctgatttagcagtgtatagggaagcatagccctgcccccaggagtgtttattgtgcagtgctctgtcctggggtgggggtcgaaatagagacagggctcagtactcgtggctgggccttgctggccaagtgccctgcctgtgactcccagaggcccactggtcttcctagggctccctggctatttcctascacttgccaagtgttcagctatctctggaggagtcctgctagggcccagttcaccttaccttctcctcctcttcctcctccccagggtggagtccatgtccctggctgacagagggaaccctggaaatattacttcgcgcttgatggagaaggasaaggccagagattgcctgattcctatggggtgagtgctcccatagctctgtgtgcttgtgccctctctgcctggggcagggagccaaggaacttttatcatctctgtggctggtggtgccaagccttggcctccttcctttgggcatggtctgctccgcagggactttggggatgagacttgatgttgcccttgacttccatttcctgaaggccccaggtcctctctgtgcccccgagtttccaaacatcgcccaccttgtcactcccacactgaggtgctcagtcataggaaggacaatggtagctccactccaaagccttgggggcctagaaagttgagaaggcagtgggaagcttgtgacgacagaacatgctggtgaggggaattgggccctgtcaggtgcaacaagaaaagtatgtggcatttgsccgggtgcgatggctcatgcctgtwatcccagcactttgggaggccgagatgggtggatcacaaggtcaggagatcgagaccatcctggctaacacagtgaaaccctgtctctactgaaaatacaaaaaattagccgggcgcggtggtgagcgcctgtagtcccagctacttgggaggctgaggcaggaaaatggcatgaacccaggaggcagaggttgcagtgagctgagatcgtgccactgcactccagcctgggtgacagagggagactctgtctcaaaaaagaaaaaaagaaaagtatgtggcatttgtatggaacactttagcttctctgagcytctgggccatccccagggtctttgggccaggagtcctggatccactagacatatgaggagactgaggcttggagaggggcagtgccatggcttctttcacatactgtatctccaagggaagcctataaagccagaagcccaggctggaaggcctagctgtggctctaggttctcaggataagcatagaccccagccaaggtgaccaggaagcttaggtttggcctttccagaggagatttgggagtcctcatctccctacattgcagcagtcttccttgaggcataggagaagctggccaggagtagccaactagtgcccccacccaggccctcccctgctccttttctaccctgcgctgaggcagctcacccagggaacaaactcctttctgcaactgcccccatgcaggctgccctctcttgaagaaagtctctttggtgtatgagcttctcaggatctggccagcattgctgacttccctatctgtgcctttatatccactttcagggcaggytgtaccatatcctgagtcatcactactgtctgtggcatggactggcccttacatcctrtcctgcctacagccttgggaacccaaagttccaagcacagctctacagcctggtcccttcctctaggctgtcagaccaatgcccacactatctgctgtttgtgttctaggataacctctgagaatgtggctgagcggtttggcatttcacgggagaagcaggatacctttgccctggcttcccagcagaagtgagtgctgattggggaggaatgtttaaagggctggagagtgaggttttgagtctatctaagtggtctgaagtggcaccatttcgtggttactgctgggcagtgagtgctttccaggccttgtgccacccaggttgggggtgggaagtaggaagtgtcagggccactgtgagttggtagtacttccaggttctattactgtctgttcaccctgactttgccctagctaggcctcagtttccccctctgttattttctggctgcggtttggggactggacattgtagcctggagtgtggggccagcaatgttagggactctggcatcctagcttctggaccatgctgggtctgtggcagcatcctgaggcaagaactgaggacgatatcagagaaaccccaggggctcaggcaggctaagattggcaagtcccggctgtccagagaggaaagcaaaagcagggagtggtatctgggccaggtgggcttccctgaggcagtgattcttagccactttgggtcacataaccatttgaaaatgtgttagaagccttagattccttccacttgaatgtccctgggcacttacatgctgcacatatttgcaagggtcacccttaaataccttgtgctttaaaattgcttaaatacaaaaatacatgagtagtttagtatatgtcactttaaataggcggaaactggggaatagatgacatcgaactgttgagtttgagcagaaaagttagcagaacccagcacagatatttctggggttccatcctcagtttagcagagagaatcaagcaggcttaatccctcttggacaaagggctctaagtggaggcaccacttccaaacaccctttcccccctttgaggttgggattggccacgatctggaggtctggggctgatggtgaagaaggccctgtaaggccttagccatgccctcagagctcccccaaagtcgagcatgtccctgaatttagcagcctgagcttgtgtctacccaaatggataggggttgggggcagggaggaagggaaccccaagggagtctgaagctggctgtccatggtgctggcagggcagcaagagcccagagcaagggctgtttccaagctgagattgtgcctgtgaccaccacggtccakgatgacaagggcaccaagaggagcatcactgtgacccaggatgagggtatccgccccagcaccaccatggarggcctggccaaactgaagcctgccttcaagaaagatgkttctaccacagctggtgagactggtccggggtaggggtatgagaaagcaggccatggccatgctgggtgctgtactctgggaacctggaatagaccaggcccctctgcaaagtagaagtgggagggctgggatctcctcatccccaccccgatgccttcttaccccaacagtttgcccctaggaaactctagccaggtgagtgatggggcagctgccatcctgctggcccggaggtccaaggcagaagagttgggccttcccatccttggggtcmtgaggtcttatgcagtggttggggtcccacctgacatcatgggcattggacctgcctatgccatcccagtagctttgcaaaaagcaggtaaggtggctccttcatatagtatctgggtcccacctggatcctgcagctgccctgcatgctgttgccaggggcatgagggtggtcctgtgggtgctgcagagtggaggtggggcaggctagtgtcccatacttcaagcccttcctgaccccacagctgggattggctcacccttctggaagagacacacaccaggcagcctgtaggcccatggatggggtgggccccaggggaggcagagggccagtgtgtcagctcaggtctttaccttgtctgcagggctgacagtgagtgacgtggacatcttcgagatcaatgaggcctttgcaagccaggtgagcccttgtttctcaatgttgcctttgccctggacagccgaggtggagtgagcgggcaggtggtgcaggggaggggtaagarggctataggtgatgatctgcctccttccaggctgcctactgtgtggagaagctacgactcccccctgagaaggtgaaccccctggggggtgcagtggccttagggcacccactgggctgcactggggcacgacaggtcatcacgctgctcaatgagctgaagcgccgtgggaagaggtaaggctttgctcctggcggtggggtcatagggggatatccaagttagggcacctgaagggcaggggatagaggtaggtgggctttggatcataatctcgacagacacagtcctgagcaccataatcccaaatgttgaaatcccaaaagatcaaagtccctaaggtcttggctggtccagaggtagtgagttatcttgattgttcagttacagatcaaactccatgttctactctttacccccttcttacttctacacttgactagtcaaggagaaaaatccttactgtctaaaatcccaaaaatcacaatctcaaaagattaaaatcctgaatgttgaaatcctaatgttgaattcatgttatgaattctagggaagggattagtgcattttccgctgtatgcaggatagtgcatcatattagttataccatgtaactaatatgatgcaaccattaccttgttattgtctttatttgaattaagtatggtttaaggagatgtgaatgggtgctaagttgacaaggaatggacttaattttgggaatacctagaaacctgacaaagcattgctttgggtgtgtctgtgacggtgtttgcagaggaggttagtgtgtgcatctgagtggaccaggtggggaagatccgccctcagtgttggcaggcaycagctaattgcctggggccctggagagaacaaatacagaaggtgaactgtctctctcagagcygggacacactttttttctgccttggacatcagaaatttgattccatgaaagtgcattatcacattgactttgtaagccttgtgcatgtacataaaaatgttgaaacttcctcagtaaaagaggtgtgctatttgtgcacctgcgtttgtgaaagataaaatttctcaagatcttggttctttggttgactacttgtgcagtggtgacccatcacaggttggtttgttgagacagggtcttactcaggcgcccaggctggagtggagtggctccatcttggctcactgcaacctctgcttccctgactcaagcaatcctcccacctcagcctcctgagtagctgagactacacgtgggtgccaccacacccagctaatttttcgtattttttgtagagacagggttttgctatgttgcccaggctggtctggaactcctgggttcaagtgatcttcccaccttagcttccaaagtgctgggattacaggtgtgagccacagtgcctggctctatcagtttttgatcaatctcatcaaaagacgtaggttgtccatcatggtattcatatgactgcagttataaagctgggtgcacatgattaccagcaatttatacagtttgcttttaacctatttatgaatacagtttgtctgtttataattgttataatcctgtgactattgttagcatacctgagtgtttatgcttgcagaaatttgtaattattttctattttattgtgtaaagtagcctgtgaagtgttctgttgtttttgtttctcaaataaatccccttttaaaaatgtacatttttttttttttttgacatggaatctcactccgttgtccaggctggctggagtgcagtggtgtgatctcggctcactgcaacctctgccttttgggttcaagcaattttcctgcctcagcctcagcctcccgagtatctgggattataggtgtctgccaccacacccagctaatttttgtatttttggtggagacagggtttcaccatgttggcgaggctggtcttgaactcctgacctcgtgatcctcccgcctcggcctcccaaagtgttgggattacaggtttgagccaccacacctggcctaaaaatgtaaatatcttttaaatcaatcttttaaaaaagtttttttctaagatggggtcttgctatattgcctaggctggtcttgaactcctaggcacaagtgatcctcttgcctcagcctgctgaatagctgggactacaagtagatgccaccaggccaggcttccaaattattttttccagaattatattttcaggattttgatcttttaggattgtgattttcaggattttagactttagggattttgttcttccaggatttcaacatttgggatgattgtgtttgggattgtgtcttttgggattatgatcgatccctggggaggggaacatgcacacagaaacaccctgaacttaggatgtaggggcatgatccctgttttccttaagggccagccttgaaagggatactagcctgcagtgggcatctgtcaccgtgtgtgtgcccaagtgggaggccagggtaccgcttgcccacagatctggtctgatggttttgcatcctacttgtccatgacgtccttctgggtcagcctggtctggaggtaatttggtgggtgcctttgcccagccaattaagttttgttttcacagggcatacggagtggtgtccatgtgcatcgggactggaatgggagccgctgccgtctttgaataccctgggaactgagtgaggtcccaggctggaggcgctacgcagacagtcctgctgctctagcagcaaggcagtaacaccacaaaagcaaaaccacatgggaaaactcagcactggtggtggtggcagtggacagatcaaggcacttcaactcatttggaaaatgtgaacactgatgwcatggtataggagtgggtggggtgttgagccacccatcagaccctctttagctgtgcaagataaaagcagcctgggtcacccaggccacaaggccatggttaattcttaaggcaaggcaaatccatggatgagaagtgcaatgggcatagtaaaagtgcatgaatttatcttagtggctgtggtttttttccaagactaattttgccatactggtcttcgctatgcactgagtagtgatctcaatgtggtggtctctgctgtggtgtggcctgtcctttatgttagctctgaggacawatcatgagggcctaggctgagaccattgtggaagggggttcttccattccaggagctgcccagaggtccccaggtccccaagtctgtgtctttgtgctgaagagctgctcctaatccctgggcaatgttttttctccagctggggcctggggctgagggctggggcggagcctcagggctggtgaggcaacatgtatctctcatcataggagccttggccccggagccgcagggtgcaggacttctcaccgagcacaccttccaccaccatcgtggactcgtacagctcactactcctgtggggagcatgtgggggctgaggttaggaggcacctgggcagggggtccaggctctgtgggcagtttggggaaggttggaaggggctgcacctggcagtgaagaaaacctgcaasgcgatggaggttgggggtgcattggcggatcgtgcttctagcagcccactgtttggggagaccctgaaggccacagcggccttggctggctcctgctggcctgcaccaaagggaagggaagacacatgagtgcaggcagccccatgtactcccacaggaagactttacccacccccgggcctgtacctctggtcttgctcagcactgcagggcagggcaaccctgagatcatgtgggattgggggactggctgctctgcagaaattccaagtggtgcctgccctgggagccagcatgcagggacggcgcacaggggccccttcctggggggtcttctcttggcacagccctgtaggggaacggtgggtaggtggcagggtaggacatacccatcarcatagtccagtagcttcggcacccgctcaggttcatcaggtagacctcccggactcgctgctggctcacaaagcaggtcccaaagtccacccagctggtggagagctgcagctcaggcacggccaccacagcccgcaggggcaccacctgtgggagaccaggcaaccttgtccattctgggtgggctctgagccagggcctctgggacacacagaaccctgctgaccccaagtgctgatgctcctgaagaaaacgggaagctcccagaagttggcaggggaccagcgccaccttaaaaggccacaggctgctactgggagtctgcacagggaaagggccagggtgatgccatccattcccccgctgtccctgcctccctaactcataaagcttcagtccctgcaccctggctggttgggctctgccctccttcactgctcctcctgtggtggcccccaaggcccagccctcagctcctctcagccgtggaccatttgtctgtgttccttggccgcaggccccacctgtgccctcctctatctcctggcagcccctgcatcacactcaggcactgccatgcaccatcccacagcctcagccccagcagctgcccaggtgccaggctagagcgcctcggctccactgctcagcctcctgcccccggcctctctagagtcttccccaggccactccttcacactccttactagcagcccctgcttagcctccacactacggcctggtgacctggtccatggtgctcgccctggtgcttgaagcctggcaagccccagggctgtccttcgcagctgcttcaggtgctctgtcccacccatcaggcctttcttttggcctggctgtcaacgtgtttcccttccttgattaaatggtgttcaggcttcatgtccttcctcccgcagggagccttccctgatttcccacastctggcccctcacctggttttgagctcatgaggcaggtgaggttggatggccctcatctctctgcacacagggcctcttctaggggagactgagccccaggacaggggcaggggctccttatttctgagggccctgctaggtctttcctcctctggccccagcagaacacagcccagcccacttccaccctcctccacatgtaggtgggcctggggcgtgcctgagtggtctggttggtgtactccaggagcaggttctgagtaaacaccatctctctctctccactcgcactctgctgaatgtccaccccaggcagtgtctggtcagctgggagcttctgataggagagcagctccagggagagtgagaaggacacgttcacctgagcagatgtggacatggtgtcaactccggctgcagagggcaggtggccacttccccacctggagctccatcctcctttcctcccaggcccagccttgcccagccaacagcccagcagctccccaacctggtgctttcattccacaagcgctgcccagcacctactctgcccagcaccctgctagtgtcagggacaagtcatgtctgccctcagaggtcagaggctagaagggaagggacatgagcaagttgccctttacagcttcaaatgcccagggctgtggttgggctcagaggcagaggaaggacttggtctgtgtgctgaggatagtgaggagcctctgacaggtcactgacctggtggggaggtgggctgcagaccacacatgagtgtgatgatgccagaccaggggctgaggctgtaactgaggctggacaggatgaagcttggactcctggctcccagcacaggtccttggtacaagcttctcagaatcaacggtgaggcacttgttaaaaatataaattcttgcgcctcacccagaccttcacatgtctggaggtggggtctgggagctgctgccttaacaagctttgtcaagggtactaatttgctgggagcagtggcttacatctgtaatcccagcactttgggaggctgagttgggaggatcgcttgagcccaggagttcaagaccagcctgggcaatataatgagaccttatctctgcaaataatagctgggcatggtggcatgcacctgtggtcccagctacttgggaggccgaggtgggagaattgcttgaaccccccaggcagtcgaggcttcagtgaaccatgatcacgccactgcactccggcctaggtgacacagcaagacccaatctaaaaaaaaaaaggccactgatctattgccaggcttagaaactgctgtcctaaaccaagatatgggtgtagggatgaagaaaagagaatagtgttgggagaactttaggagggggcatccgcagggcttggtggcttggtcagagatgggtctaggacaaggggtgccagagctctgggcatgagcaagggggctggggttggtatttgctgagacaaaatgccaccacaaaaaggaggcacagatgtggggcaggacaaggtggggaggggatggggagttcactttggacagattgagtttggctctagagcctgggagataattctggccaggagccagaagcctgagcattgttagcgcatggagggtgagatgcagcaccattaattatgtgatgtcctttttctggaacttttgggcttccccagagctgccaaggacttttaaatgcctggtggctaaccgccgtgtctccttggaagctctggtggaatggaacctctggctgtgctctgggccttcccatccatttagctcgttgaagggagcaaacgcaaagtgggtcaagggtgccattctgtcttctgcagatccgtgtgtgtccctgacctccatgatgaggtcctcggggagtaccatcacctagcacagcatctagtacacagcaggccctcgctacacagtggagtatacattggatagaaataatatggctgttcactgaggctctggaaatggatgagacaacccagaaatgtgcagagtgaggctaggacctggcagagctcaagggagcacagcataaagggaagccctccgagaagaagaaagagggcctctgaagcaggaggggaagtaggagacagggcggcgctgtctaccctcagcctgcctctgcacaccctggaagcccactgtgcagatatgggtgtgcgcacactcagcctcattccagttgcctcagagaccagaggaagttgatggtttccagtgaggtcctgacattcccaagaccttcccctacctaaccaactctgaaaatccaggatccaattgtcactgagaataagtcagaagaggaaattttacgttagaacctggagtgtcttacaattatggcaaccccatgggctcacctgagctgggacacaaaccctgagcttgcacaggaggacggagtctgtgtgtgtgggaaggggaggtgctcacaggaatgcatcagcctccaccagcatctcagcagtggggactaagagggaaagggaagtctggggacatttatggagcacgtgcatgcatgtatgtgaacacaacgtctggtgtggccatgcccatgtgagccacttgtgcagaggtgctgaatgtggtgtctctggtgggagtgcacccccgagtgttcatgcagggtatggcagggtcaggcatgcagtttgcgtctgggtacaagcacctgagggtggcgtgcaggggtgctgtctgtacacatgtgagggtgtgccatygaggcaagggctgcagactcccccactgaccagcatgttctcctgtgcttggagcaccagctgcttgtccgctgaggctgtctcctcctcacactcctgcttctggccagggccaggagctctgtggtcctggctcgccccatcttgagaaacggagaagggcctggagaccataagccggaagtagtgtgggatctctgtagtgttggtcagcttcaggtggtgggtggtcaccagctcactcagcacctgggcagccacagaggtaggaggcagggaatgcatcttgtctctctcttcaaccccatggctctagggtagggctgggagggctgggggaggggatttgggctcagactataaggcctgagtcccacaagggcacacagagacatctgaggtccaggtaagctggcagggccagagggtggcagcacactcaccccagagcagggctgctcgggaatgaggtcactggcctggcactggaattccatactgccgccgtagtccagctccacacttagcctgcccagcaataggcattgttggggcaagccgggcgcctggggccttctggctgcccccactctgctcatccagcctcgggccagcctttccctgggctcctctgctgacttctccacccatgcccgtccttttgctctgagaaccctgcctggctccaccagtgcctggtgagggtgcaccccatggggatgaaaggagatggggcaccccagctgactcactgtgcaggcctcacgtagctatgcaggtccagtttcaggggtcccaccgcaaagtcctgcaggcgatgcctcttccstggaatctccctttccacctactgagcccaagtctgatcacagctgatccctgggctgagtaggcagcatgctacccaggagggagcagtggctgcggcccccaccccaggccggaagagctcaccttgctgtccaagctcatgaaacccagggcgtagccagtacactccaccttgtgcaggatctcagggctgagcaccataggggtgaaggagatgtagatggtactgctgmccccagcagggaccacctggcatagacacagcagccttagcactgtcccatgcccactggccggccaatgcagacagctcccagcccataccccaactcaccacctgcttggggctgatacagtacaggtggccggagggcaccccctcatgtgcctgcaggatgactgagatgagcttctgtgccaccctattgctggcactggagctgccctcaacctgtcaccaaggaatcactgaggttcacgcagtcactgaggttcaactagcctactggccacacctcagtggccctcagtggccagcctgccccgcccctccacccctgctcactgatgagtcagtttcatggctgaattccgatgaactggaggggcctggggaccagaggaggcagccaccctcaggggtatcagggcacacaagctcattcccggcttggtcccgcagcgggaaaggtggcccataaaacaccagcagctccaccagccggtcttccttgtcttctggaacataggtctcccaatccaggcggatgtctggggcagatgtgtggagcagggtgaggaataagggaggagcagacaaccccccggggccccctcctcctcatacccccagacagagatgacctattctcccatacccaggtggagggggtgcctctctgcctctctaatgccacttccaggcaattctcatttaaaattttaaaaaggctttacaggcttatgccgtttggctctatcacctgaagtcctcatggtcacaagaccaggtctccatgtccagatgcctgaatgcaggtgctctgctctctcccacagctgcttctccttccggcctgtttgtgggcaggctgggctctctaacccccacatgcccttccttctccccatctatccatcagcctatgtcmgctttcacgtccttccccaggcagactagtctttgggggccgccatgtccacctctgtcttgccagcatcctcgtatctccctttgcacccacctggcaacacctaaccctgaaagaactgaactgtgccgtccctctgagtaccactgggggaagtcccccagctgaacagattgccacccccatcaatctgtccccaacctaagctggggctccccattgctctctctccagcctgcaccatgacaatgtcaagctgtccctgccctcctctgacacctccatctgccttcccacacccagccggtagccccacctcatctcccagaagcccccaagctgagaagtccccaaagtcctgtcccaaacctagacatctgcctgcatcgaacccatcttcccctcccctcctgccttcagtcctgctcgcagctctcctcaggggcaggcatggccagggccccctcttcagtgtcaccagcttcctctcctaaccctttctcaggcccagagcactctttgcccccacatgctcccctggcccacatcggcttacccttcctcttagactcagcctacactctgcctcccctccacaggggagcctggcccttcaacacgttcccccagcactccggccttcccttcagttgtatgccacacactccacacactgcagtccacagtcacatctgtcccacccatcaggagggaagcccctcggcagaaaccctgctgtcctgtccccgctgtatccccagcagctctcaggcaggtcaggtcctgccggctggaggaatgagaaagggatcccctcttattgtctgttcctccaaacagcaaccctgatgagagcagggcatctgtgggcccatccacacttccgtaaccacaggccccctggacacctgggtcctgttcatgggccatcggcttccctcccaccttccctcccagcctggctcaccacaaggcacagcctgtggcaagaacactgacttctctcatgcatgtcttaccacaggggctggagttattcaggcraagggttcgggtaactgtgtctcctccggagacctgggtgccgaacctggagggggacagactggactcagtacagccacagccagcgtacaccttgcaggtagggaggagggctgggactgggggctcaggcagggggaaataccacagtggtctggcctcactcgagaattaatgagacctggggctggtgcyttccccaggcggcaccaggtgagctgggctctggggctgccctgtgccctggcaacccacccacctgccctgagcagactatgctgattccagttcaactgtgccaggggccccagggctggtgctgacctcggaccacactgactactcgccacttctgccccacaaaatccctcagagatgtccaggtggtggccacgtcccctgaggccaccttcccccagggaaaccctggcctggaaccttcttgtaggtggcaccaatggccctaggccagctggagaataacaagccaacgtgggcagcccagcccggaggccggagggtttcaggggctaccagggagcagaggctcaggctgagcatggagcacctcatggctggttccttctgggcctggtcaatagtgtaggaggtggtcctcagggagctgatggggcagcccaccgctgccatgtgcactgggatgacttccggcagcaggtctcccacctgcaaacacaccccagccctttgtcactcctgtcaccggttgcgaccacatcccctctgggcaaggcctccacttgtccagccagcccaggggccccacagtttggtcccagcctcactgtgtaccactctgtcttctctcccacttcccgccatctccactctccctcccagccaggcagcctgcacaaagctcccagcctgaggacttttttttttttttttttttttagtagacacagggtcttactatgttgctcaggctggtctcaaactactggcctcaagcaatcttcctgcctcagcctcctaaagtgttggatctacaagtgtgagccactgcacctggcaagcctgaggctcttcggcctctggtagtccctttgatcaaatttctgtcttttaaatgaaaagaactttattacttttctctgctaatcaaaagtaataaatcttatttttagaaaatataagagtgtgataatcacctccaatcctacctctgcagcatgacttactgttagcatttcagtgtacaagtgtctacacttcttttgtgaagacccagatataaatggggagcatgctgcacatgcctttaataatcttttcttttaacaatataggattattattattattattattattgagacagagtcttgctccatcgctcaggctggagtgcagtggcatgatctcggctgactgcaacctctaactcctgggcacaagtgatcctcccacctcagcctcctgaatagctgggaccagagacataygccatcacgcccagctaatttttgtattttttgtagagaaggggttttgccatgttgcccaggctgctctcaaactcctgagctcaagacatccacccacctcagcctccctaagtgctgggattacaggcatgaaccactgcacccagcgaacaatataggattaatttttactaataaagagtttacagcatcatataacaggctgtgcagaattcccttagggatgtggcccaatgtctgtatccactcctctactgacagacgtggagaagggggctcaaagcaccctttcccctgtatcttcaccaacaacttttaaacctcgctaatgtgtcaaaaccagtattttgtggctcttttattttgcatttctttaattatcagtggtggtgacagattttaatatgtttattggccgtctgtctgtatttgtctttcttggagttgtttattcaaaccttgcccacttgggatactcttccccagcttcctgttacttaagatccctttttatattaacatgatcaattctttgtcatacagaacacacacaatttaaagcaaatatctactataattaatctgttcaatttactaaatagttcatgaaaatcttctatttaacaacttaacggtaggataacgtatgcaggtttcatccctccagactaaactaggggtgccttgctggttaccttattcatccctgtatcctcsacactacagcggcccacacaggaacccacacacagtagatactccatttatgctgagtgctggagcaattaaatggacccctgggtgagccccaccaagggcggggcaaggacctggctctgggaggctgctactgtccctccactccacactccctactccargtcttgggtcctggcccaggcagcagcctactgtctcctcttccctcctcgatatggccccagccctgcatctcctgggaaaaggtgtggaaagttctactgcttatgaggacccctcctgcctgaaatgcctcagccagaaccccagaggctgcctcagacacgaatgcccatcccaagctcggtgggcatcgcgtttcaacctggtgaggtttgagagtctgarggccaggtgttggaggggagagargctgaaggcgarggctgggcagactctccaccccccaggccactgccctcttgtgtacccttaccgtgcagatgaggttgtcccagtactcgccccacatgttggcacagcctgtgatgtcaatgcacagctgctggtagggccccagcatgccctgggaaaagtgagggaagaaagcagctcctttcccgtgggatagcatgctctccataaaatctgggaaagaaccgcgactgtgggggattcacgggcctggggttgggagtgaggtccaaaccctcgtgtgtgagcaaagcactgtccccgataagccaccctccagcctctccttggtcaggctacatgtgccctcctcctgggagcctggaatccagaggcaagctactcagggtcctgcgtggtcagcctctctactccctgagaggctgggtccccwtgggagccctccctcatgagccactcccatcccaaatggagtccaggccctgtgcatgagcctgtgccctagaagggaagtgscctcaacaggaagaggcattgtcaggtggagcgccttgsccatctgagagcagtctctggtcctggtcccgctccctggcagctgccagcccacatccacagaaggctgtggctctgkccgtggcctgggccccgaagccccaccctggtggcgcttacccagctgctctcgcttggccaggtgctcttgcatccgcactgtctttagcagggcaggaggcatgttgggactttacaagtggagacacagaaatagtatcaagtcagacaagcctgtcccaagacctgagccaggttctagagcaaccagcattctaccaggtgcccagcagaggaaggtggccctgcctgctcttcccaggggagagctggtcagttctttcctttacctccttctctggtctttgctcccactgtacccctaccattcaaacatccccagctgcggrccacccgccagctgcagggattacctccccagaaacccaggcgggctctgaagcaggactccctgcccacaggctctgtgccatggttactcctggacacaaacccagcccagactccccatctctagcccagaattctgcaacaggcccatttccagtttttcctgctgacatctgtccagcattgggtacacactagctttccacaatagaaagttaatgccttataaactgttcatgggtcgccttccacccatagccgtggtttctaagttgggccctcttgcttcactagattaggtggtgaggtgtccacacagtggagattccagaaaaaaaaagtcctaaattataatgtttgatttcaagttagagatttgcaaaattcctgaatatttaacaatcagttctcctgaaccagtgctagctggttctggcacacctatgtgtatgtgtgtatgtgggtgtgtgtgtatatgagcatgtatgtatgtgcatatgtatgtatgtttatgtatatgtgtgtgtgcatgtgtatatgtgtatacatatgtgtatgtgtgtatatttgtgtctatgcatgtgtatgtatatgtgtatatgcatgtgtgtatgtgtgtatgcatgtgtatatgtatgtgtgtatgcatgtgtgtgtatatgtacgtgtgtgtgtgtgtgtgtgtctgtgtaagcagcactctagatcttgcctctgtccttacacatagtagctttgctgatcactgtctgatctatggggcaccccatctcactctccacatgtcagcccaggcacgctatcagtggtccctgaagactccctactcctgaactattcctcccaccctttggcctgcacagttccttctgtctacagtaacctctccctcactacaggcccatctgcctggtccatcagaagcctccactccagcaggccaggctgaggaaaaggggccgcaatcccagcctctcccacacgcccactcagggcccgggaggtggacagcaggagccatttcctctctgcctgtccccatgtctacctgtaaaaacacacactcccatctctcacaccgaccagccactggccacctaagccacacagaggctcaacagggtacaccccatccagcttcatctgccctgggaagtgaaagaagcaagacttacaggctggtctttttgctcaggctgttttgggggctcccgaartactcaaacttgagggagaaacgggtccgtattggggagcgattggtgagaatgagctggcgagtcacacgggtcctcagtggcaccgctgagccaaagtccaggcggagctcctttgggtggcctggccactgctctgtgctgaaaacactgtcctgtgcccattggtactatgtaacacaccacccttggccctgcccagggagccatcttgggtgggcatgcagaagctgcccagacaccaggcttcatcctcagactcctgtttcattgagctgccaaccacagacccacctttcctgcccacccatgatgctgagagaggcctcaaactctgcacaaaccgtccctggccagcggcatgctggcatggctcccagttgctgggcctcatgtgggcaagcccagggtacctacagccctgtcccctgccatctcctgcctgccagggcaccacrcctccaagtgtgtgtggggagaccacacagagggcagggatggggtaaagggagctgtccccacaggagtggtgagtggccgcaataacactgtggcgttttcctgcctgcaggaatcagatgggcgcagactgataccacagtgccgtgctggtcctgggcgcggctgcctcattcctcagtccactgccacccccagaccaccaaccctgggctcacctgcaatcagagctctccttagagatggtaatggccacttgcagtccctggggcttcccagaaatgcctagaaccagtggcttcttcatgcctgacacgtgacaagggagggccagatgggtcagctcttcctataagaaagcccatccaggggtcagaccaggcctggggcctctgaagatgagcccagatggtcttccgcagcacaggggattgctgtggagccttgacctctggccaggctcatctccagtccctccagtgagcccagccagtcgacccgccctcagccccaggaagcctggccctttcctcaggccttatggctgtctgagtctgccccaaatatctgggcatgcccacgtgaagggagacccctcagagagggcctctggagaagctgcgcacttcctctgatgaagctgctaccctagaaatcaaaccctccctgagcaagatctgttccacacctgggcctgcctgtctgtcgtcccagagctcaggccggccatccccatatttgccagggggagctgagacctgagtttgcaagtctctgtaaggaggaagtttcttttcccacaagaaccacaaagggacagctaggaacggccctatgactgagcatattccaccctggtggcctccagcgggaaacctaggtaccagttagcctccctgggtagtacctggcacagtgcctgctgtgagcaacagctctgctctggatctctgggcaaatcagaaagctgggcccacctgcggccacagagaatggcctggggagggcaaaaactcatgccaaaggccaggcatggccagtgggtctcagggsacatccccaggcctactccaggctctctgaccatgtgtccctagggagcagacccagcaggaatggggaccccagacccaaatgcaagaaatctcttccccacccacaagaaccagcaatgtggcctaagctagggcctccctggtggcacaggtgcgtatggttggcagggtgccttcccggtcactcaggccctacattgccttactcacctgggtatgagcagtcaactccaacttgagctggcactcctcacttgggcccagcaggccatgwttgggggagactgtcaccatgcagaattctgcttggtgtccgaggagctggcagacacatgagtgagcctgttgtcacttactgggctcccagaatggaccagtatccagagagtgctcagcactgctgcatgcaatgctggagactggcagactggggcccacagcaaaacngacagggctgggtgctcacttctggggataaaccacgggtcccttctcctctcctccccaaccctggatggactttaccacttgttgggaggttatctggacaaaagaaactgcccttgaaggccccgagggatggggagcagagggcagatgcttctggtgcacatggatgtgkccttatrtcccatgacactcagagctccccagtcagccacgggcaggagcagcaccacaactgggctccaacagctacctgggccagtcatgggctatgttggctgggaggctctagctatgttcaccagaaactccttcttggtcagggaactggaattccctagaggcagggcaagaaaaagctggaccagatatgctgctcctttgaggagcttttatgcacactacgagcaagggacaggctgtgggagggaggctgagtatctctgttctgtgaggatatttgggggacaatgcccccctctatgtgggcctctgtggctgagggctgcagactgctgcctgatgctgtgggctcactcaccttgccccagtggaactgggtaggcaggagcgtgccattgataagtgtgatggttgtcttcgtgggcacacccaggtagagatttctaacctccacctggctgctctgtaggtacacatggggcttctgtacctcagcatacacaggaaggtagctggaacacgaggaaacaaaaggcatactgattagaaaagaagaagtaaagctgtccctatttctagatgacatgcagtctatgtagaaaatcccaaggtatctatatttttagaaactctagaattaatgagtgggttcggcaaagtttcaggatataagatcaatatacaaaaatgaatcacatttttatatactaacaacaaacatgtggaaatcgaaatttaaaatatagtaccatttataattgctcaaaaagtagaaatctcgggtgtaagagaaattgttgcaagaacactctgggcttatttcaaagtggcttatttcacttttcctctgggcgtatttcagaatggttacttcccctccccatcccaccctggctaaacaagagagaattttttttccagttttcaccatgagaacctactgagcccccaggatttttaaactcttaagctagcctacacttagccaccaggaatttgttgaaactaccatttaagtgttcttctgcttcaggtaaactgatctgtattctcagtatttgcctatatctccagcttttggggtggccacttgtcctgcaacctcaactctctgatagatctaagaaaaatcattgtttcagtttgttcagtctttccttgttgtgagagcaggagcttgatgggcaagctctttacatgtctgaacggctgaaggtattttgtaggtatgattaatgttcataatcagttaagtttaagtaaaggagattatcctagataatctagatgggcctaattcaattagttgaaaggtcttttttttttttttttttttttttgagatagagtctcactctgtcacccaggctggggtgcagtggtgcgatcttggctcactgcaacctctgcctcctgggttcaagaaattctactgcctcagcctcccgagtagctgggactacaggcatgtgccaccatgccaggcaagtttttgtatttttagtagagatgaggtttcagtgtgttggccaggttggtctcaaactcctgacctcaggtgatcctcccaccttggcctcccaaagtgctgggattacaaaggtgagctaccatgcctggccactaaaaggtcttaaaagcagaaatgggcttacccagacaaagaaattccatgtgtttataacatcttcatcttgtccccaaaaatgccagcatgcccttcctgaaaacctgccctacagattttaggcttgcctagctagtccctatagttgtgtaacctgattctttgtaataaatgtcttaataggttattaagaaataaatattaagccttgactgatataaccatatcaagataaattcatatgtaaatacaaagacagaataaatgtatttttgcttacttttctatctgatttaaagggcaactatacaaaccaataactgtaaaactgtcttgataaacctataatgtataaatatgtaatttgtatgacaataatagtacaaaggaaggggagagaatagagctgagctatattacagtaacatttcagactactgaaattaagttggtgttaatctaaaccagactgttttgaaattaagatatactataaagccctggacaaccagtaagaaaataactttttaaaaagtaaaagaaacatggaaattaaaatggcatactagaaactacctatctaacaaagaagaaggcaataatggaggaatgcaggaaacacaaggaatgcaggaaacacaaaatacatacagaaaacaaatagcaaaacgggagatgaagttctactttatcagtatttacattaaatataaagggattaaacaatccaatcaaaaggcagagattagcaaaatggattttaaaaaaatgatccaagtatatgctgtttacaagagacactttagattcaaagacacaaatmgtttcaaagaaaaaggatggaaaaatatatatcatgcaaacagtacccaaaagagagctccaggagatatatgaatgttagataaaataggctttaagacmaaaatggttattagagacaatgaaggatattttataattataaaaagataaattagaaagatataacmattatmaacatgtatgtatctaacaacagcaccacaaaatacatgaagcaaaaactgacagaattgaaggagagatcagcaattcaacaataatggttggagacttcaacagcccatttttaataatggaaaaacaactaaccagaagataaacattgaaatagaagatttaaacagcactataaaccaaacagaacmggcaacactctacacaataacagcagaatacattatttttctcgagtgcacaaggaatattctccagaatagcccataaaacaagtctcaataagttttaaacgactataattatataaagtgggttctccaacaacaatagaatcaarttagaamtcaacaacagaaagaaatttgtgaaacaaaatatgtgcaaattaaataacacattcataaacaagtcaaataagaaaccacaagaaaaattagaaaatacttttatatcaatgaaaatgaaaacatgatatatgaaaagttataggatgcaactaagggagtggttagaggaaaatttatatttgtaaatacaattttctttaaacaaacaaaaaagaaagattgcaaatcaaaaacctcagcttttaccttaagaaactagaaagagaagagcaaactaaacccaaagcaagtggaaggacagaaataataaagactagaaagcagagataaatgaaatagaaaatagaaaaacattacagaaaatcaacaaaagcaaaagctggttctttgaaaatatcaccaacattgataaacctttagctagactagactgaccaagaaaaatttgctgaagattcaaattagagaaatcaggaatgaaagtggggacatcactactgatcatacagaaataaaaataattatcagagaataccactaacaactatgtaccaacaaattacatcacagataaaatggacaaattcctaaattcctagagtgatgcaaactaccaaaactgagaaaaaaaaaaaaatctttttttggggggatggggtggggcatacagagtcttgctctgttgcccaggctggagtgcagtggcacaatctcggctcactgcagcctctgcctcccacgttcaagctattctcatgcctcagcctcccgagtagctgggattacaggtgtgcaccaccacacccggctaatttttgtatttttagtagaaatggggtttcaccatgttggctagcctggtctcgtactcctgaccttaggtgatccgtccacctcagcctcccaaagtgctgggattacagtcatgagccactgtgcctggccaagaaaaaagtctaaattgacctatataagaaattcagttacaaacatacctcatgttattatgctctgctttattgtacttcacagatactgtgatttttacaaatcgaaggtttgtgacaacgctgcattgagcaagcctatcaatgtcatttttccaattgcatgtcctcatttcatgtctctgtgtcatgtcttgcaaacttttttgctatagctgttatggtaacctgtgattagtgatctttgatgttactactgtaattgttttggggtgccataaacagcaatcatatacgataatgggctcaactggtaaatgctgtgtgcattttgactgctctacttactggtcatttccgtctctctccctctcctcaggcctccctattccttgagacacarcaatattgaaattagaccaactgataaccctacaatagcctctaagtcttcaagtgaaaagaagagtcgtacgtatctcactttaaatcaaaatgattaagctaaaaaatgattaagcttagtgaggaaggcacattcaaagctgacacaggcagaaagctagctttgtgccaaacagacaaattgtgaatgcaaagaaatgtaatatctagcaaatgccctatttgtgaaaattttgaagtaaaagataataaagcaaataaaatgttatgcaaacaaggaaaagaaaataggagaaagaaataatgtgatcaggttaactgataaaacagaggagaacaaaactgctgcttgaaatccctgcacaggttacgtgcaatgcaatccttaatgatggaatgagggcatcaaagggcgggggagctgagcaaagcactgctgaagatccattggcttagccaggtcagggctccagccccagagctcagagcaacacatggaagagtgggctgccccaggcacagaagtcaaatatcacatgatctcactcaagtgggtgctaaaaacgtgtacatatggacatagagattggaatgatagacaacggagactcggaagggtgagggcataggagggaaatgggtgatgagaaattagttcatgagtacaatgtatgctatttgggtgatggataccctaaagccctgacttgaccactatataatctacgcacataacacaattgcacatgtaccccataaatttgtacaaataataaaaattaaaattgaaaattaagaaaaagactgggctgccacagtatttgcccccactgaagactgtgggtatcacgctggagagaggccagggcagagcctgcagtaacactggacctctcaactgtcatgaggaggaaacaaccagaaagatgctattccttcattcttatttatgaatgaaggcacgaattgatttgtgtagctgcccagtatgggttttctccactgtttgtttagggctgttttccccaaaggtccctttctctgatggattcaggctagctgtgtgctctgagggtggtgactcacatgtacttcatcccttagaataggggtgctctccacatctacccccttttactcagaagaaacttacaacaccagctccttatgcaaatcaacttcctcctccattcaaaaacaggactggacaggcaaagattactagaagcagaagaaaactcaaaaagtaaagaagaactccaacatctgggaaaacagaaattcattttcttgggggaatctgagaggctgttgcattgataagactataacagattactatagaaaaggaaagacgcaagaacaacaaagcttgaaatttcgaaacatgattgcctcttctggagacagatcctccctgtcacccagcaggggaaggggcgggtacatgacccacacaagagcaagagcaatcagggcctatctctgcaaagagccagattggctctcagagattgttaaggtgggagtgtgtgagcctggagctctaagtggcctctccccaaggcagagtgcgaagggcccttgtcaataggggagagaagggcccacaaaaaaagagcagtagatgggttggggctgggatggaggtagagaagggggaaagagggtagagaaagagaggaagcagaagaccagacaaagggaaaagtgttgggcccttggattcagcaaggtgggaatgcccagttacgtgagccaatgcttcctcttttttgcctaagttggtaatgtctgtgtttccatcacctgctactgtaaacattctgataatacaaggtcctttcaggagaaagaacagagacagaaaaggaaaggaaataagcacagacttaatagaaagcccttcccctgagctgcaggcagacttagccttcacatctaatgcccgcaaattgccctgaaggaccaatgcaaagactcatacctagacctgtatttgttatcacaggaggggacatttgaacaactgtcagatggtcaagtatacaaagtccaacaacatttgtcatggtgaaagtgtggggtaatggctagtctcacacactgtaggcagaagtataaaatgacacagtctttttggaggataattcaagagcatccacagagatttaaatgagcatttaaatgtttttacaatgaaacaccaaatatatgcaaaaatgagtataaaacatatatacagtttaaacatatatatagtttaacgaataataaaacaacatctatgtactacctccacacaactttagaaacaaaatattatcaccagccagcttaagaaaatgaatatatatatatattcattcactgcaacctctgcctccaggattcaagtgattcttctgcctcagcctcctaagtagctgggactacaggcgagcaccaccatacctggctaatttttgtatttttagtaaagacggggtttcaccatgttgccaggctgatctcgaactcctgacctcgtgatttgcctgcctcggcctcccaaagtgctgggattacaggcgtgagccaccatgcccagcaggaaaatgaatattttatttgaaaataatttgggaaggagtggggagaaggagataggggatatggatgaaacagtacttgcagtgagttgacaattattgaagggaggaaagagtatgtggaggtttattatactattctttctgtttttatatatgtgagaagttttccactagaaagaaagaaaaggagggaagtgggggagcggagggagaatgaagaagaaaaaaaggaatactaccaatacctttgaaacctctagcatgttcctcccagaatacaatggtatgtgcttatttaaatatgtcacactttttaaatgtccattctcctgttgacagacagtggttttttctagtttttcctgtaggaacagtccagtctgagcattccaacatgagcacacatctcccactgtgcatgtataaggatttccctgggagtatactcagaagggcaaacactagctgatgctaacgtagtttcgaaagtagttatactaatttacatctctttaatacacacaccctagaaagatatatacataatattatcagtggatcatccctagggaatggattatgcgtcattttgagtttcttttctgtaatttacaaattttatagaatactaattttctggattcaatagttttaaatccagaacatctctagataaatatataatatagataaatacatcacgaatatgcatagtttgttgtagtggctcttcccacggcacccttacctccaggcaccattttccacctccagctccaggacggtctccagatgctggcagtgcagggcctccaaggtgatgtccaccctgcactcccccagagagtgaagctggccactcgaaggctcaatgtcgaagggagacacctgccccggagaacactcaggaggatgagcactgaggacacttggaattgcagaggaactgggggctggccatgcctaaccaaagtcactcctaagctgccccagctcttccaagagccatctgggatccagaaacaggcaagcaggtgggggaccacagccacaagagtctcaggattaagagcatagaaactgagtctccaagtaaaggaatacataagtcagagggccccatgccctggcccagatctgagagatagaaggcggagggaggtgctccagggaaaatggggagagctggggagccagaggagagctggtgagccaaactaggggggtagccctctgagcagcttcaactgaggaaagccaccaggtcactagattaggggaggggagagtctattgtggccagatttctcctttgcacccacgtggtctttcccccaccccttccttctgtcccctactgcaggctcagcctcatttacccgcccccacccccaccccgcccccggtctgctcctcctcccatgccaggcacacacacaaagggagaggggaagggaaagagcaggaagaaaagtgtccccatctggggagggctctttacattccattcttcctgccctgactgagagaggacacttgtccctgtaaggagccactttgctttattttgtctttgttgctcatgtgcatctcccttggagctctgggggtggctgtagtctagggttgggtttcagcagctctgcgtcccctaatctgagaccatctaacaaaccccaaatcccaacattatttttgagagctcaaaagaatagagtgcagagaactgtagagagggaattatcttacaatactataacattggcaattatttccattataaaacatagttattcttcacagtgggagaacaccacagactgaaaactagacaagagggatcagatgtgatgccgctacccatcagccgtatgaccttggggaagccctgccccttccagtctctcctctatcaaatgaggaggctggctgaggtctgtaagcttctaactgtgctctggaaaatcccaggaaatccctagaagtgcaggggactggaatgtggggagaagcaggatggggcagaggtgcctaacaagggggtctctgggtggctggagcagtcacagtttattctatgttctgggcttttgcataaagtttcatttgaagaaagggttcttggctaaacataatgtggacactaaagatactgatgccaccctgcccccagccccatcccagcccaagcgccagccttagtcttttgtggtttcaggatccatggtgggagatggatgagccctgggagggaaagtattgaactccaagcctgtgtaacaggtacttggcaatggcgttggcaatttgatgcacactgtcataacttctaggtttcagagtgcccagctataggccatcaggtaaaggagcgaggcctccctggaatagaaaggaaagcccactttcctgcagaaagggaatgcacactagcaaaataaggtatatgcatggcttggattgtcttccctgggctccttaatacagaaggaaaagtgtgcggtgttctgactcggagggcaagtgggcaagcaggatggggacctcggtgggaagcagccagaaggagagtgtggtcaccagacatggccagggtctcacatgtgcagtccaccagggagctgcagccatgccgtggtgaaggggcggtgatgtacgactcactgcgggcattttgcgagtagctggtgatttgtgtgactttgtcttgttccagatcgcccactgcatttaaatatgattatgataatacttagctgctttttttcctacttttatagtgaaaagtgccatttgagtcgaaataaatcttgaattttctttttggagccttgggtttgggctgccagcctgtgaccagatgccatctggtagcagatccctgggaggatctgaaccttccagagagtggggaggaggtgggaatgcggctggagcagcagcagccttggaggcttcctgcccaacctagctgcccatctcttcctgcctcagacggctctgagggagaaacccacgccctatttctaaatccgatggtagtgaaaggcacaggaaatgctgatgggggattacatttggctgtagagaggagctgagctgcctcagcgatggggagaacaggaggcaccgccaggccgaagtcaccaggcaggcttttcctccaccagcctcgaagctctgatctaaacacaccagggcaagtttcaccagggcaagctaaacgggctcattgtgggggcaccagaggaaccagcagtgcctgacttacatcctcaggcctttcctggagggagactgggctctccttcatgcgccatgtggctgggagctggctgacgttccggatctggatggagtttgtggctttctgccccaggcggagcagaccaaactgaagggctgagacgttgatgatgagggcaggcccctgagacacccagagggcctgtcactgggccacctggggatggctcagtgtcccagccctgccacctctctgggcccaccccactgcccagctccacctgcagcaccttaaagacagcctcaatgtgtaacaccactggcgagggcgagtcttcgatttcacacagcaggtcctggcttgtggggccagggacacccccagtaaagttcaactcaaaatccccgacctcactgggctctgagaagagagggaaagggagaggtggagaggagaagcagaggcagtttcctcctatgattgggcccagacatctggcttgcacagacttctcatctccctcacatcccaggcctc

SEQ ID NO: 96123 - DNA, 34133 bp, Homo sapiens
gcatggtggcttatgcctgtaatcccagcactttagaaggatgagcaggtggattgcttgaggccaggagtccaagaccagcctggccaacatgatgaacactgtcactactaaaaatacaaaaattagccacgcatggtgtcacatgcctataatcccagctacttgggaagctgagacacaagaattgcttgaacccgggaggcagaggttgtagtgagctgagatagcgccactgcactacagcctaggtgacagagtttgactctgtctcaaaaaaaaaaaaaaattaataacacaagtgaaataatgttatacatggatattgtcctgccatttgtatttttcacttattatgtcctatggcaactcatggagaactacttttttcttttttgctcctataaataatgctgtaatgagcaaccttgttcatgtttgtgcatactttgcatagccgtacaatgtttctgtgggataatatcatagaagtgcttggccaaaggtgtgcacattttaatagctgagatactgccaaaatgccctccaaaaagattataccagaatataatcccatttgcaaaatgtgagagttcatggacattttaaacatgttttgaaccatatcccagtttttatccctagctcacatctccctcccaaactccagacttgtacatccatcatgttcttgacatctggatggcacctcaaacttaatatgtccgaaatagagtgcctgctcctcctcagccttccccatttcagttaatgggagctccattctttagttgtccaggcccaaaatttggagtcatccttgactcctctctttctctcacagcccccacctgtaattcctgttgactctgccttcaaaatatatctggaatcctatcaatttccacactcaactcctacctccaaggtctgaaccaccatccactcccaccggaattgggtattacaagagtctcctcactgggctcttgcttcagcccttgtccctccgtggtgacttccagcactcagaggattcttttacattagtcagatcatgcccctccctggcttgaagccttgcaagtgctcccaatttcgcccagagtaaaagttgaatttttttttttttttgagacagagttttgcttttgttgcccaggctggagtacaatggcgcaatctcggctcaccgcaacctccgtctcctgggttcaagcgattcccctgcctcagcctcccacgtagctgggattacaggcatgtgccaccacggccggctaattttgtatttttagtagagacggggtttcaccatgttagtcaggctggtcttgaacttccaacctcaggcaatccacccacctcaacctcccaaagtgctggaattacaggtgtgagccactgcacccagccaagttgtattcttttttgttgttgttgttgttgtttgagacagagtcttgctccatcgcccaggctggagtgcaatggagcaatctcagctcactgcaacctcctcctcctgggttcaagtaattctcctgcctcagcctcccaagtagctgggattacaggcacccaccaccactcccagctaattttgtgtgtgtgtgtgtgtgtgtgtgtgtgtgtgtgtgtgtgtgtatttttagtagagacagggtttcgccatgttggccagcctggtcttgaactcctgacctcaggtgatccaccggcctcagcctcccaaagtgttgggattacaggcgtgagccaccgtgcccagtcataaaaggtgaattattacaaggcccaacaggacttggtcccggttacctctctttctcctcccatgatcagcccgccccacttccccgttctcttgctctcttagctccagccacattggccttgtcctccttgctcatcctccaacataccaacaccctcctgcttcagggtgtatttcctgtgcctggaatcttctgcccagatatctctaaatgtctcagtccctcacttctgtcaaggctttgcttgactgtcacctttcccataaaatccagcctgatcaacccttttaaaatttaattctgtcaggtgaggtggatcgcttagggtcaagagttcaagagcaccccagccaacatggtaaaacccgtctctattcaaaatacaaaaattagctgggcgtggtgccacacacctgcaatcccagctactcaggaggctgaggcaggagaatcactcgaacctggggggcagagactgcagtgagctgagatcacaccactgcactccagcctgggcaacagagcgagactccatctcaaaaaaaaaaaaaaaaaaaaaattaaccctatcccattcctgaactgctttaacccacttttttcattttacttattatctgctaatatcctgtacaattcatttcttacatttgttaaaatgtctcttttctttccattagaatttgggctccaggagggcaggggtttttgatgtgttttgttcacagatgactcccaagcctctagaacagtgcccactacacagtagctgctcaataaatatttgttgaataagtgacatagcagaacagttttcaaatgtgggtctcttcagttcacacatcccataagtgtgtttcctccttcaggtgagttaccctctgcctcctccttcagataagggtctgagggcaagtttcctgtctgttccccatgccaagcactgtattctgcctctggggtggaggtgagcattgggactcagtccacagtgaaataaacatcacagttacattcacaaatgaatacacaataaaatcccacaaatataattatagaatagtaaccccaaataatcccatactgtcctgggactaccagcaggtccagcagcctcatagttcactatggcatcctggatccctgcaaggtcaggacctgaggatctgaccctgcatgacctgaggactctcactttgccacmrctgctcccttgggaggagcagccttcacttttcctcctgatgcatctggacttgggcccatgaccctctggagggagctcctatgggggttttgcagccctcaaaagcagcaggggcatgacctcagaccaacagcctcaggttgggctctggccacctggatctgtagaggaggccaggcagaggatggctgtgggaatatgggattctggtggccttctagcaggtacttatttgtgccctgtacttgccatccattacttctgccagttctaaggatgattatagctcctgattgaggagctcagagaagcgaagtcacttttccaaagtcttaacagcaggaagctgcaaagtcaagatttaaacagccccttcaccccatatcctggagcagaggctctaaagacagggagggggcagaataaaccccattcacctcacctacccaagctgggctaggtttgcatttcatgggggagggactggaaagggccagccctgaagcacgcttggagcctgaccatcctgaacgttggcattcttgggtgataataccccctcctcaggcctccagagaaagtagtggtggagagaccaagtgaagtggcttgaggcaggcactggtgccaacactaggtctctcttccctgtctccagtgatcccagaagctccatcaccccatccatcctcacacagacatagaagactgggcatggtcaggagagtgagatgccagaaactcccccattaaagaactagtctttggggcatgtgtgggccctctgtgtacccaaactaagcctgccaaatagccctctgagtcaccgggatctcagggcatcttgcacaggcaactgagagctgggttttgaggagggtaatttaggcacctggccagggctgggcccacagacggccctgggagttgagggcagagggagtgaaggcaaagggaatggaatccagcaacttcgtgacttggtacaaagcctctttgcctcctctgagctccagcccctccacacaagttcactcataccacacaggcttacccctagcaggaaccagcagagcacctcccagcctgtgagagccaggaggggccgatagccaggggaagagaggagaggactggagtgagggctcacccacggctctgagcagccgccgggtttctctatgagcagggcggggcccagccctcatgtctggcagaacctggttgcatgtgccagctctgagtcagcagtgcccatcctgcccaagaaccctgggctagggaggaggctgcagctcctatgtctgtgccaggggccagaggagggattctgtgaggtgggtttggagcatgcaaaggaagagcctggctgcatccccaccatggtacatagacaaagggaaaggagaggctcccaggtaatgtcctggcttggggcctggggctcagagttgggagatgatgtgaatacataggaatgatgactgagatgaagccatgtccactcctggtgtcagagtttcactgtgacgctgcctaggaagaggaggggggcttgaggaggcctgatttgctgagtacaggggcttgcaggctccaggagtatcagaggtgcaagtggtaggctccaaggcctgaggaggcctccagagggcagagaaggggacccttcttccccactcatcccctgtatggaggtccagagtgatgcctgccagtatgaatttgctcatccctcagcaaacatggtgtgtggccctgggcagaagggaaaccaaggaaggaactgacaggcctgcccagggcaggggttgtttcgcactgcaggacagtattggagctgagtgccaggtaaggggtgaagccccttgtggagagggggcatgcagagcaggggggctctccaaagccagaagtcctgatccacttttaacccccagaaccagaagactgtccttcagctgtttcacatcccttattcaaggccacctagggccaagaagaggagggattggggtgagccagccccctccccgcagagctgggtccactagctttgcctgaactctcacattggccttatcagcccaggaggcctggtggcttcctgggaggccctctggggkcctctgacaccaagagcccagttttcccaagggactctccaaaggggtggtgggcaacaggatctagggaccctcccaggttgttggtgggaggggtctctgggcaacctataaagggggttttctgggtcccaagagttagggggtgggtctgcatagggaccttgcccagacagccccttgggaggccacctgaagaagggaccctggggatcctccccctcggctgcatggatcgctggggttttgggatatgagtggctcaaaagtgaaatccgtgcacctgcttgcttccccctcccacacccccaacactccaccaaaggcactcttggggttagaaacctcccagcgagagggaaggggaccctcctcccgacaaggtccaggtattgctctctgaagaccttctaatcgtgtccgtgcacccatttcgcagaagggaatgcgaacgctgggagctgcggctggaagcctggacgccgcgtctccctagcgcagcagcccggctgggcgtcggaccttacacgatcccttccccgggatgacgccggattctttccagcatcaccccgaccccagcgaggcgcccacaacagggcgtggggcccggccgcccgcggtaatgacagggcccgcggcccgtgggtggcggcggcggaggaagctggaggaatctggctatttctggtcggggcgcgcccgctggcccgggccagggttggccagtcctccgggcccccagctctgccctccctctcgcgtccccagaagggggcggggagagacgagggttggcgggctcagggggcgggggcgcagggcagcgggggcggggcggtgtcccgggaccacccccggcctcctcccaccgcggtccattcaggtccctgcaccgcactccgctcggaccccaggccgccggtgctgtcgctactcaagtgagtcccgcggtgcccctcccgccgcgccgcccgtcgggcatggactcgggccgggacttcctgaccctgcacggtgagtgcctggcccgcgcgagcgggagaccctgcaggggtggacccctggaaagctgttccgggccctggacagggagcccccagctccttcggccgcctccacaccaccccgggcccgcctctctgccccttctccggactgggaaaatctcagcccgcggctccctgggtgggactgccgggcacgaccctgggcgtttccaggcttgtccgagatctagcccggggggtgggtgggcgggcggtackrgtctwaagacttccctccgcctcgcggacccccttgtcctggtcatgaaagtctgggctccacgatcccgctcgcacggaggggcggcgaaggaaggaaacagcatccaagaacgaccaaaattctccttgccccatccgggccgccccagaggctccccaaagcctgggcgtgcctggrmcscgtcaggccgcgcgggtgtggcggagcaggggctaagcgggtggggagaggaggtgtgcaaggttaaccgtggtcgggccgtgcagccttaactgcccagcgcagaatagtcagcgatgctcaggctgaaagaagcagcacgatcccctcatctgcgaccctcctcgggggacagggccaggtctcagccggagctgcctgctccatcctttgtccagcggagctttgtttcctccaatatgagccagctctttgccctttcgctgtccctccagcagcgaggggagcctgggctcccgaaggcagatctggaggccttctgggaggcgggaggttggggagggtaactttgggcgcctctttgctccaggacaggcactcactcactcttggtgggggcttgccctcctgccctcccaggtcacttgccatctcagcaaaccctgctcctttcataccaatcactgctttactgtatatccctctcttttttagtacccttggggttggaggctttagtggccaccacccatccatctaaactgttcatggacataatagatgggaaagagaagggcagagtcctctagccttccactagagtccccctggaatttagagggacttagagatgttcccatcagccagcctccagtctatctcgtgttctgcagttggcacagacctggtcctcctggcccagagagaccttgctctgtgcccagagctgttgcttttacaccaatagcctaggctccttaaagccaccttgtctagatgagtcatggagtccctgccccttccagtgctccctcttctttcttcaggccagaggtgtctttcgtgcgcctgccagactagcaagaagggaggctggscagctgagaggacacagtggacatctctgctttctctctgacacagcgtcattccttggctcctgttggaacaggcttcatcctcagtgtctgtgcctttgtccagtttctctcctgaggcagccttgatatcttttccatggaggaagacacatggaggctcagtcaggacctcccagtcctgtggcataggcttggctgccctggcccaccccatttgagaccagcctcccaaatgcctaactcagtccagcctttcctgaagggttgacatgaacactgtgaccccaagctgttttccctgaaggccctgccacttctagctcatcacccaaaattacctcaactgccttctgtccacactgcaaaccagatggggaaataagaacctgtcaaggagaattgttggtgggagggggtgatcactgtgccctgtgctgttccaggttgtctacacttgcattggagagtctgcatccgtttcacagtgtgggtgccccagcactggatgtgctgcaggaccacactctctggcctagggctccacactctctggaaggagcccagagggactccttctrttggcctggggagctatgcggctcacctagatgtgacatgtcccttctgtcctcaccccagatgcatgcagaagtaatgtagtttactggcatagattctgaaagcaaagtacctgagttcaagtcttggctttctcatctcagatgaatcccttgacttccctgtgtgtcagtttcctcatctgtaaaatgggggataataccatctacctcatagggttgctacgaagattgaatgagataatatctacacagcagttagaacagtgcctggtacccagtgagtactatgttcctgcaggaggccccctccccaaatttctatgccctatgagttgccatctrtagttctttgggagatgatgggggcatcataaggtagttcctagtcatggaaaatagggccagaactagattcaagagcgagccagccagctctttctagtgcctctgaagccctcagactgatgcgacagcatccatcctccttccttcaccttacttcttccactctttattctggctatgcctggactggcttctctagcaggtcccccgatgtgcccmaaaggacattacctcccagggccctcccctcactgaacaccccccacatacacactaacttttcctacacccaatcccttttgcccccacccctgcaagaggtgccrtttgtaaaaacagaaaatagaggggcctcatcttggccccagtagacctgggctccagtcctagctttggttctacttactgtgggtctgagaatcatccatgggatagcagtacatatttcacagtgggtgttgtgaacataaacgccaatgggcatagaaattctaggttgccccaaaaaccagtcctccaagagatgatgattccagagctcttagcaagttggggtggccagctcctcactcacctgtgttccaaagcagtctgcccctgggcttccaggcccatgctacacaggcacacactgatccacaccaatcttaactttttgtgccacagaccactttggcagtcaggtgaagcctgtagaccccttctcaggattatgtttttatttatttatttgtttatttatttatgagacagaatctcactgtcacccaggctggagtgcagtttgcgccatctcggcttaccgaaacctccacctcccgggttcaagggattgtcttgcctcagcctcccaagtagctgggattacaggtgccggccgccacgcccggctaatttttgtatttttagcagagacggggtktctccatgttggccaggctggtctcgaactcctgaccttaagtgatcctcctaccttggcctcccaaagtgctgggattacaggtgtgagccactgcgcccggccaggatcatgtttttaaatacagaaaataaaatacataagaattcaaaggaagccaattattttgagatgttattctatctacaggttcttgaggggtctttggtctggttaagaacccctgcgcagtttctccataacacaggctccctttgcactctgcttcccctctccaaagaatagcttttccgtgttcatatttcagctcatctaccttgtccatctactcaccttgctcatgatttattctctctgatatgaccttaggcaagttactctgcgcttcagtttcttgttattactgctgtgcttgtctgtgccaataactggctttgccagtgactcactgtcaatgctggtgactggagctgcagtgaagcgaactgggggaactattcagaggctgagagtaagagtcaggcctctgggtggtgtcctgacattggcacacagtaggggctcaataaataattactgggtgaatgaaagggaagttgtgatgtacatgaaaggacccactgttcccgagcatattggcagcaaagttttgtgcaaagttacagtcgttctcatgtatttatgaaagccaccctgggttaatgggcttattttaagatcagaattttttcaagaatttcgtttgcatccgtcaccttggggattatcactttggtggtcaaaccgagagaagcaaacaggcccacctgaggttcacaaatgaggcaacagcaagctgagtcgcaatgaattagttgagcaattgaagtaaaatacttggggggggctcggtgtctggcccaggctccatccccggtcccgcctgacctcgccccactcaggtccccgctagactgccatccacctcccactgggactcccctcagcttttctccccagactcagcccttcggttctgcgccagcctcaaaggtggcgttagaattcgccgctccggctccttggtcagaccccgcccacactgcctcccggaccctggctccgcccccgcaccgcctccaaagccgagggaccgcccctccctgcctggacaccgcccttccagtgcgggatcctcccaggctcgcctcctgggccctggccccgcccccgggctgcttcctgggtatggctctgcctccacgtcgcctctggagcagaggctcccggcctgagctccgcctctgagcctggcccctccttcgccccgctgccttggctctggccccgcccccaggcttcgacacagatttgcttcctgggttatggatttgtcccactccgcctccgcggggcccggcacctcctcggccccgcctcctgggttctggatccacccccatccccacccacgcctcgacaccactctcgccccatctccaggggtcgttagtcccacccctcttggatggcccagccttttggggtctgactctgccctccttagcccagattttcttctcgtcccgcctcctgtattctgactccccccactcatttactttgcctcggtttcgctctcgcctcaccttcagggggcataggtcccgccgctcgtggactagctccgcctcctagcgtctgactaccccctcagcccagatttccctctcgtcccgcccctccgaagtgcgcccctcctctcgaactctagctcctccctcccattcctggactccgcccctgctcccctccaagggcgacagttccgccccccggaccagagcagagggtgttgtgagcataaaacactggaggcggcactgccccggacccggctccgcgcaggcaggggcactgtggagggccatgcagtgcctggggatccggagccggagccgctccagggagctctacctgcaggagcggagccttaaggtggcggcgctcaatggacggaggctgggtaaggggcgcagagcactccgagatctgcgggggaatgggaaggcagctggagcaggacgccgaccacttgtcccttaacgcggggccatttgccttggagcctttaattggacatgtttagtacttctgtgagtgtgtggcccactgtggggcagtgtttgcagtggtagcacgtcggggtgagtactagggtgattagttaccccttctcattatttaactcagcccttccaacgctccccatcccttgtcacccgacgccttcctgtttacaaatttctgaggcaccgtgtatgtggcctggtctgtgtaaccaatgaggtgatctgcaagagtttgtgcttcaatatgatcctgtgcaaaagtgtgcctgtatgtgatgggtgtgacagtggtgatctagtatgggacccagtgccgactgagtagttctgtcatgcctggggtctgtggtggggccactgtacagtgtgtaatgatggtgatggtgtgtaatgttgtgaaacaaagtgtgtgacattgtggcactgaggtggctgcttgtaacccagtgtgacagcgtgtgatctgttgtgatactgttcaactgagtgtgactgtataaccaatgtgacagtgggtgacctagggtgactgagtggttctgtcattccattatggtgtgtgtgttatatggattttctgatgttcttactctgtggcagtatgtcccttcacagtggctgcgtaaagtttcataccgctgaccctgtgggtaagctacctgcttctgagtcctgactccaccatgcaacttccttgagcctcagtttcctcttgtgtaaaacaggaataatgacagtgccttcctcagagggttattgagagaattaagtgcatgtgctaagaacagtatcttayttaaatattaactattattatgggagcctctatcatcatcatcatgatgctctggcactatatgttgtgtggctatgcatgactaagtgtgacactgtgcaactccctgtgacagtgtgtaattttggggggcagtgtgtcattgtgtgtggctcattgtctctttgaggttgtgtgagtggtggtctagkgtgtgactgtgtatttgtgtggccatatctgtgtagctgtgtatcgctgtgggtcccaggcccagtgtgtctttattatgcatcacccttggtataggaacaggactcctggcacctccctcagcttcccactggcacctgcaacaccctgtatgccccaccacatggccacctcactgtgcacagctagcctgggcaggctgcaaggtcaacccagggtcagctcaaagtctcctcgccacgaccctcccacaggaggagaagctcttagattgatgcaaaagtaatcacagtttttgctattgaaagtttttgctattactttcaatagcaaaaaccgtgattacttttgcaccaaactaatattatgactgggttgagtagggctgggtgaggggtgccacagactttctgggtgctaagggagcaagggtggtggggcaggaagtccagaagctttgggaacagaagggccccaaatgaggctaagagatgagggcacctgcccaggtttcctaatggtccagagggctgtggctatcacctttctggaattatcaccctggaactgatgtccaccttttagaaaccattgttggcagctgggggtttatctctgcctgactgtagatagggccacagcctggctccaggacaggatgagcatgtcatctcttcatggtgttttccagaacaggagggtggtgctcaacttctacttcctggctcccagctccattcccatacatgctgttggcagtggcttgccctgatgtatgcccagcttgtggggtggggtgctggcagagggtaaggagatgtccctctcagctttagagggacatcagccttagaagggatagtggaattccccgccrgaggccggaggtggccctgtcctctggcagcctgggaactcccttctgcctcctcttgtctcaggctcctcagacacagccagtagttgggaatattctatcagagcccccttcttttccactgggactccccttgggctaagagggagctgctcacgctaaggcacaacagctcatcaagtgggtggacagacctgggagaaaggtggaggaaggtcacatcagactgtcacccctgaggaggcccagggatgcctcccctacactgttcttagcccagtgctgatgggggracaaaagcagagagagggaagggagttgcctaaagctatagggggtggatgttagyactgacctctatcctgattggaagcaggagactggggaaggataaagagtgtgtgagcaactgaagcctggggaagtggtccagagggttctgtgagccctgaagatatgtgggacaggctggctgggggaggggrtatggataaaatgggagaggccatctgttgttggggatctgggctcagaaaagaaaaggcctgtggcttcatgagggcttccccacataggcttaggctcaagaccctcagactagacccttgaagtccctgaggctgccactgtgctggagcagcaggacagagattgctgatgggccacatagttctagggagagaagtgaagtggccgattggctctcaatagagctggctgctggactatgtacgtggctagggtgatacacgcacacatacgcccttatagatgtttctrtattacaccagtgggttactaagggttggggtcacttttatcaactttatcagttggtacagaacctgctgggtggtgaaggctctggcgtccttttggtgcctcctgtctgggcctggtaggactgagggcatcgcatctttgggagcccacacctctgagagcagcaaaagagtggggcaggactggggcaagcagccaggttcctctctctgggctctgggacaggacctgctcagcttcggaaagggatgcactgtgccttaaagctgctgtatcctgaggggtcccagaccctgggcactctgagatggggctggggcagcgaaggacagggccatcccagcagaccaaacacaggctacagtgcactcatctgtctcttcttggggcaaagatcagagatcactcatgtgggctcaagtcagaggtgggggggacagcaagggtaagggtggcagagatgggcataggggtcccacagcaaccacaatgttgacaccaagaaccccaactgccattatctyggggcctgcacagattcaggcatcatctcattgaacctagaacttccctttgaggtggttgctgttattatctccatttcatagacaggaaagcagaggcccagcagcatgaagtcccttgcccaggtcacacagctygttgggaagggcacctgaacctaggcacaaatgattctggagctattggagttgggacgttgttggctccatgacgctctggggtccatctgtgtctgtcccccttttatctccctgctttgcctaaccttttgatcccagcttccttcagttcactctgactcctaagtgtgaccaggaggggctcacctaatctttcaaaaccatctttcagaacatttcttagggggctggtcctctaggaaccaggggttcttgaattagctgcctttcttttgttcattcagctgtgggtggcacgtcacagtgtgtaagtatggtcttgggtgggcaggtgtcccgtttgcatggtcaccttagctggcaatcagggatgacttcctggaggagggcaggctctgggagcaggttggagcatgggtggaggagggaggagtaaacagagctgaggatgaggctggtgaaaagtgggctctgagagggtcgaggtgggcatggccagtgtgaggcctagggcatcagggaaactagtggagaaggtggcatcttactggctttgatccccaggcctacaggatgatgaggatctacaggcgctgctgaagggcagccagctcctgaaggtgaagtccagctcatggaggagagagcgcttctacaagttgcaggaggactgcaagaccatctggcaggagtcccgcaaggtcatgcggaccccggagtcccagctgtgtgagtgccctggggtcacaggggaggggatagagtgtggaatctgctcagggctgggtaaatacaaaggtcagtcatggatcaaaaccacagatggggaaactgaggcctggcctggtggggcataggtcatttatayaacctgggctggcagtggggaaactgaggctggctggggttggggagcagggccagttaaattgccatcgggaaattgaagcctagtctggactggagagggcagtcatggaacgaggaccgcagatggagatggcaaagcttttgagggatggggatacttaaccatgaccacagatggggacagccaggctcagaagcagggagggagttggacggtggcccaaggtccaggcagataaggtacttccggggttgagtggccaggtgggagctagggctgcaggaggcagctcctccctgggactggagccacaggaggggtgttagggcagagcaggactgggacacacagacagaggccactgctggggagcccttgtgggtctgagggcattctggaagcttctaaaaagaccaaggaacccaagtctcaggccacaaatggagagagcctcctgcaaggcctcagggagaagaaagctctgctcacttcactcagttctctccctttaagggagagaattccctaaagatcctgtaaagtgagatgtctccctctatgcctttacttggtggggaaattttagaccgatgctgtacagttgaacaatgatggaaatgttctatatctgcactgtccagcatgggagccactagccacttgtggctattgattgagaccttgaaatgtggctagtgtgactgccgaactgaattctcaatcttatttaattttaactaawttatatttaaatagccccaggtggctagtggctgctgaattggacagtgcatatagatcattgcagcctgggtttcacatagccaggcccctggagatccctcgcccattctcctgccattggctgaggtgtgggtggggagatgggggcaggtctatggggagtgagactggacatgggtgataagcgcaggtaggaggagagcataaggaaggggaggatcaccccaccgagggtgcctttcacccaggaagggtctgccttgcctcaggacactggacaggaccctgagaaggtatggcctgccaacctgtggccagtggaggggctgaaggtaaggcaggacaggagcagggccagttgcagagagccggctgggtccttggggctgtgagccatggaagatttctgggcagggcagggtctgaggggtaggggctccagaacattctgaggaaaccacacggagccccagctcagcctgctgccacactgtacaggagtgaccgcctgaccttttctctgtggcgccagacaggctccttcatggggctcttgccctgatatgggatttcctgttagatgctggtgggtgggagcacagtgagaatggggatcttatactctgagccctggggattccctggagcccacctacctaccgatacgtatggatgactcccagtgtgtgcctagctcttgggaagcatgagaggggagatagaggagtggaagacccaggcctttccccgcaggaaccacatttgagctggcgagaggaggaccttgtattgggacagctgtgagcagatgggcaggaaggacattgcaggcaggaggcccagtgtgagccaaggtgcagggtgaggaggaggaacaggcatgagtgggaggctgaggggctgcgtcctgccaggaggaggggctgcagggagccaggtccagggtcagggagccaggtgtgcgcaggtatggagcaaggcctgagggggctttctgctggtcagacgcctgagacgggtctcgtgctgagcctgctttgttggctgcctcccttctctgggtgagtggtgagactgttgtcttcaattgctctttaacctggaaaacagaggccaggtgagggaggcctggaatagcctccccttctgcccagttttctttagctctgcttcctgctttttaagtctccccaatcctgccactactacccacccccatgactctggttcccagaggccaaaggtgttatcagcagtgaaggcatctggactttctctctgtgtgggtgagggcgctggccttgggtgggggtcccatggctcaggcttcctgttttcattcctgacccaggcagctgcagctgcaccctgtgtgcggccgtgtgggtcaccaggggctgcaggcagagggattaagccgtgctatcctctgtcccccacatggccctgggctcatgtgtcccactcctcaaagcctgcagcccaggctggcacatgttacatctgtgggccctgcaggtggctaggaggcccctgggcactcagagtgggtgggcacagggagggacaggtggacttcagctagaaccgtctaggagccaggacagatggatgaggatggctcaggatggaggtatggcaggggcagagcctggatcctgctgctgggaggcacagcatgagcctgactggaagaactggctcctggccaggccatggagggcacattggaagcgggggtagacagggcctggcatctccctgaagcttggaaggctgggtgtgaggggagggccctccccttggctcccctaagggcagaatgatgtaatctctcagaaccctgcaggagaccctccagtttgcctcttgggactggggaaggcagagtcttcctgtaccccctgccaaggggctccctgaagtcaggacacacacagctgcacacagggcaygaccctgtctcctctcccatgcagggcttctccctctgtcttcggccctctgcccatagaccccagggctggggctaactgagggtggttccagtctcttgaatgttcaggagaggggcctggtggctcttgtggctttatcgggtcaggacagacccaaagtccaatacagtcagaagggtgcatggcccttctctgtcatgggccccacactccagagtggtctgtccgcatctctaagagccttgccctgctccagtcctctccctggggccctgcaccccccatcaccgagagagcaggcctggggtcccaggtgccttttccgccctaaagtctgtctttctctcactctctgtctctccctgtgtgtctccactgtgcctgcaatgactgtgtctcatgctctgtctccccctcagtttctgtcttcctttctcctttttgtcccccacttgtccaacctcctgcccctctcctttccttctggactcaaggcctgagctccggccctggctctgtgtctccaagccatgcccctctctactgtggccttggccatgtcagggtcagggactgacctcacagcattctctccctctctcctccaccatccccctctcgcagtctccatcgaggacattcaggaggtgcgaatggggcaccgcacggagggtctggagaagttcgcccgtgatgtgcccgaggaccgctgcttctccattgtcttcaaggaccagcrcaatacactagacctcatcgccccatcgccagctgatgcccagcactgggtgctggggctgcacaagatcatccaccactcaggctccatggaccagcgtcagaagctacagcagtatccttttggtggcagtgggtccaggcctggcttgtggacactggctgtggttatccccagggcaacttgggtatggaagctggtttaggtactttgggctgccataacaaaatatcrtaggtggcttaaacagcataatttattttctcacagtgtggaggctggaagtccaaggtcagggagccagtatggtcagagcctggtgagggctctctcctttgctggcagatgactgtcttcttgctgtgtcctcacatggtggggagagagagactaggttctctgccatctcttcttgtaagggcactaatcccagcgcgggtgccccaccctcatgacctcatctcaaccaagttatcttccaaaggccttatctccaaatatcatcacgttgggcattagggcttcaacatataaattttggtgagttggggggtggggtatacaattcagaagggaaggagggaagatacatgaagccctctttggtctagtctgaccagagcccaaatagctctgctgctccctgatactccctgtgtccccgtctgtcaccagcatggagttgggggtctggggagcctgaggggagcagcctgctgcaatgggagaccagtcttggatgttttaatcatgttttctagagttaccacacgatttccctctgggagttgggaggccatggtaccctcctgtgccattctttggggagtgatcaagttcccctgggcctggtgtgtaggccagcctgtgagctcaaaacaaattaacttcaacatttagttacacaatgacacactggtttatgattcgaagtggtcgggcttctggcatgtatggattagggtggagccagctctctccattttttatggcagctttattgaggtgtaattcacataccatataattaacccttttaaagtgttgaacctgattcagtgctttttagtatattcacagaattgtgcagccatcatcacaatcaattttagcacatttccatcaccccagaaagaaacactgtaccccttagcagtcagtccccatttcacctcaacccccagccctagacagccactaatctactttctgcctctatacactttcctgttctgggcatgttacagaaacggaatcatggagtcttttgtgactggcttctttcatttagcgtgatgtttgcaatgttcatccatgttgtagcctgtgtcagtacttcattccttccaattgtctagtaatatgctactgtatggatagaccacatgtatctcttcaccagatgatggacatttagattgtttccactttggggcttttatgaagaatgctgatattaacattcgtgtataagttttggtgtgtatatatgttttcatttctcttggagtagaatcgctgggtcatatggtaactatgtttaaccttttgagaaactgccaaactgttttccaaacaggctgcatcaatttacattcccaccagcagtatacgagggtttcagttttccatgtccttgacactacatttgtcttgattatagacaccctgtgggtatgaagtggtatctcattgtgattttgatttgcatttccctaatgattagtgatattgagcatttttccatgtacgtttatatatcttctttggagaaatatctattcaggtcctttgcccattttttggwtcatttgtctttattattgagttgtaagagctctttatatattatagatacaagtcttttatgagatttatgcttgcaaataatttctccattctgtgggttgtcttttctctytcttgatgggtttttttaggctagaaaagtgaaacagtgagagtggagaaggaacaaagaaatctggaactgcttgtgatcaattagttgtaaacacccctgcactcagatcagcctcttgatattctttgaagcacaaaagtttttggttttgatgaagtgtaattcatatactttatttcttttgttgtttattttttttggcatcatattcacgaaagctttgcctaatccaaaattctgggattacagcagtgagccactgcgctgggcctgagttctcaattttattctgtttgtctatatgtctgtccttgcaccactaccacaatattttgctttctgtaactttgtagtaagttttgaaataaggaaatgtgagttctctaaatttgtttctgttttttttttcaatattgctttagctattctgggtcccttgaatttctatacgaattttaggattagcctgtcaatttctgcaaagaagccagcaagattttgmtagggattatattgaatgtatagatcaatttggagcatattcccagtataataatgtcaagtcttctgatccatgaacatgtaattctttccatttatttatgtcttctttcattttttttcaacagtgccttatggttttccaggttttgcacttaaacaatttctttaaaagcattttattcactttgctgctactgtaaatggaaatgttttcttaatttcactttcaawtttttcattgctggtgtatgtccactccttaggggacacattttgagccctgttaatttccttttctgtgtgcttttgagcatttgaaagacttttaagtgttatttctcaatggcacatctgcctgattgtgagctttttaaaaagcccaattctatggcatttttgtcataatcccacctttggcagagccttgaccttggacagtctcatgccctctgcagagtcctgctgcctagaccttaagatcataaagccattctaatttatagtgcatacactcagtggaacattatacagtcattaaagctgtttatggagactacactaacacagggaaataattatgatataatgttacacagaaaatggactacaaatgtatgatttccattatttttggcagatgcatcattaggaaaattaaaatccgggcggggcgcagtggctcacgcctgtaatcccagcactttgggaggccgaggcaggtggatcaccaggtcaggagatcgagaccatcctggctaacacggtgaaaccccgtctctactaaaaaatacaaaaaattagccgggcgtggtggtgggcgcctgtagtcccagctacttgggaggttgaggcaggagaatggcgtgatcccgggaggcggagcttgcagtgagccaagattgcgccactgcactccagcctgggtgacagagctagactccgtctcaggaaaaaaaaaaaaaaaaaaagaaaattaaaatccagaaaggctgggctcggcggctcacacctctagtcctagcactttgggaggctgaggcaggtggatcgcttgagcttaggagttcgagactagtctgggcaacgtggcaaaaccccatctctccaaaaaatacaaaaattagccaggcatagtgacatgcacctgtagttccagctacttagcagactgaggtgggaagattgtttgaggctgcagtgggccataatcatgccactgcactcaagcctgggcaacagagcgagaccctgtctcaaaaaaccaaataaataaataaattgcagaaaaaaatattaggaggaaaatgcaaatatcagaagcttctggaggaggtaggtagatctttaaaacttcattataggccgggtgccgtggctcacacgtgtaatccccgcactttgggaggccaaggcgggtggatcacttgaggtgaggagttcaagaccagcatagccaacatgctgaaaccccgtctcaactaaaaatacaaaaattagctgggcatggtagcatacgcctgtaatcccagctcctcaggaggctagggcaggagaattgcttgaatccagagggcagaggttgcagtgagccgagatcgcgccagtgtactctagcctgggcaacagagcaagactccgtctccaaaaaaaaaaaaaaaaacttcattctaacatatatatgttttccaaattgtatatatatgggtatagatgtggaaaagaataattatgacagaaagccaggtgaaaaaagtcaagtttagaatggtccagccaagcacgagattcgtgtgctgaaggctattcagcaggtggaatatccatttctttagtgttggatatttattattatatattatatgttgaaaaccagtccagatggctcatatctgtaatcccagcactttgggaggtcaaagcaggaggattgcttgggcctaggagtttgagactagcctgggcaacatagggagaccctgtctctacccaaaaaaaaaaaaaaaagccaggcgtggtkgtgcggtgcacacctgtagtgggaggatcacttgagcctgagaggtctaggctgcaatgagctgtgattkkgccactgcactctaatctgggcgacagagtgagatcttgtcaaaaaaaaaaaaaaaagaaaaggaaaaccagaaggatatactttggaatgttgatagtatttatccctaggtgatagactacgggagatttgtttgattgtttacttttctgcattttctaaattgtctacagtgggcccttttgtagtaagaaaagaaatgttttaaaaattttgaaaggtttgaaaaccagcaaatagaaaaagaccccttaacattttcctctgaagaggccactgaaacatggatgtgtagtaagtcaggcctgcagggagctgtggctataggtggcttcagctggagccatccatggctctggctgggaccttggtaggttccagggttcctgggttctttccttacttcttgcccagctggattcactcctgcttgcgaaaagctgacaaaaacaaggacaacaagatgagcttcaaggagctgcagaacttcctgaaggagctcaacatccaggtggacgacagctatgcccggaagatcttcagggtgaggcaggaagtgggggctggggctgcctgtccatggggcccttgaccmcsscccaaggcctgctctgagcccactcggctgtcctggctctgcargagtgtgaccactcccagacagactccctggaggacgaggagattgaggccttctacaagatgctgacccagcgggtggagatcgaccgcaccttcgccgaggccgcgggctcaggggagactctgtcggtggatcagttagtgacgttcctgcagcaccagcagcgggaggaggcggcagggcctgcgctggccctctccctcattgagcrctacgagcccagcgagactggtgagagcctgaccagggcctgctacctgcagtcgcagggccgcactgggctgggagacccctggggagactgcagccagaaagaagggaaccggagggaaggggctgcctcagccagccccggggccctgctccacactttctggtcctatgaaagccggcagatgagagacagggctctggcatccctacccttctctggtcctgtttccctcttggcacctccttcagggggctttgaggaccccttcttcaagaaacaagagagatggctgaaaagcagatgctactcctgcttcttttttttttactcattcttggcccagctttgagatgtgatagagcagagaagatgggtccctgccctggagggggctccagtctggaggtacagagaacggggagatgacaccctgtcctcaggggtcttagagtgtgcagacaggggaggaggaggagacagggccccactctggagtagccacagtctggtcgagagcctcagacttatcctaattccaagagctctggaagactggctcaggacaggcaggcaagcgggttcagagggctcctctgtccagatgggtgggcagccaggagcgcctgctggaggctggctctgacgggcagtggcctcctccctcccagccaaggcgcagcggcagatgaccaaggacggcttcctcatgtacttactgtcggctgacggcagcgccttcagcctggcacaccgccgtgtctaccaggacatgggccagccacttagccactacctggtgtcctcttcacacaacacctacctgctggaggaccagctagccgggcccagcagcactgaagcctacatccggtgctgctcagggagccttgggtcgggagtctgggtgggacccgggacaggacctggagggtcctagccaccaccctccccgcagggcactgtgcaaaggctgccgatgcctggagcttgactgctgggacgggcccaaccaggaaccaatcatctaccacggctatactttcacttccaagatcctcttctgcgatgtgctcagggccatccgggactatgccttcaaggtgggagtgcccctggcaggtgaggagtgggatgctaggggtggcccaccactcctaatgtgcccttgggcctccaggcgtccccctaccctgtcatcctatccctggagaaccactgcacactggagcagcagcgcgtgatggcgcggcacctgcatgccatcctgggccccatgctgttgaaccgaccactggatggggtcaccaacagcctgccctcccctgaggtgtgtggtggggatgggggatccctgggggagggtggggagcctagccggggcgctaggtgtgtcttgaccagttgcccctccccacctagcaactgaaggggaagatcctgctgaaggggaagaarsyckgggggctcctgccccctggaggggrrrgkggccctgaggccactgtggtgtcagacgaagacgaggctgctgagatggaggatgaggcagtgaggagccgtgtgcagcacaagccmaaggtttgagggggagctktggggtggggcagcccgggccttccccatcccctcacccgtgggaggtctgccttgtctcagttctctgtggctgccactcagaccctctgccccgctctctctgtctgtctccctctgtctctctgcgcctgggtttctggctttctcagtgcctaccctaccccaaccactgaatctaacccgggcctccccgtgttccccaggaggacaagctcaggctagcacaggagctctctgacatggtcatttactgcaagagtgtccactttgggggcttctccagtcctggcacccctggacaggccttctacgagatggcgtccttctctgagaaccgtgcccttcgactgctccaagaatcaggtgaggcctggctccccaccactcccctgctctgttacagagagaattggcagggcagggcttgggcctcaccaggaggcctccactgctgaccgaaccacacctcccctcaggaaacggctttgtccgccacaacgtggggcacctgagcagaatmtacccggctggatggagaacagactcctccaactacagccccgtggagatgtggaatgggggctgccagatcggtatgggctggctggggctggaggaggcctggaggagggtttcagtcccaagccgggggcctggagcctcgaaggccatgcagtggagctctgaggacccaagcagggtcaaatgcaggggcttgtggagctggtaatatcagtctggaaatatctgcccaccagcatgtcacagtgtctgaaacctcattagcacactagtcctttgaattctcacaccaggaatggaaggtgtggttagcatggtgggtcactgagggtggcaggagggcagcaggcattggagtgatgctgggccctgctaactcaccatgtgaccctaggccttagtgtaccctgagcaggctgtgctctwrggccccagggccagcccacagcctgtgactgctctgtcctgcctgtagtggccctgaatttccagacacctgggccagagatggacgtgtaccaggrccgcttccaggacaacggggcctgtgggtacgtgctgaagcccgccttcctgcgagaccccaacggcacctttaacccccgcgccctggctcaggggccctggtgggcacggaagcggctcaacatcagggtacgctggacctaggagggacaggtgcccacggacctcccttccccgctaccactcctgaactgtccattgtcctctgcctttcctcaggtcatttcggggcagcagctgccaaaagtcaacaagaataagaattcaattgtggaccccaaagtgacagtggagatccatggcgtgagccgggacgtggccagccgccagactgctgtcatcaccaacaatggtaggtgctgggcctgggctgggctactagggctggtgtccatgctgctgatatggtgcctgtccccctaggtttcaacccatggtgggacacggagtttgcgtttgaggtagttgtgcctgaccttgccctcatccgcttcttggtggaagattatgatgcctcctccaagaatgacttcattggccagagtaccatccccttgaacagcctcaagcaaggtgagtgtcaagagaaggggatggccaaggtggtgggaagcagggcctggcgtctcttgggctggggctggctgtcccttgacgcatccaccccccctccgccgccgaatgaccagaactctctctgtgttccctcctgcctgtccacccaccaggataccgccatgtccacctcatgtctaagaacggggaccagcatccatcagccaccctctttgtgaagatctccctccaggactaggctggaggaagccagtggggtcccccctgagtgggctgggccctctgtccacatgtggggacagggctggtgtggctgctcccagcctcttgctcagagctaggcccccaaattgccttcagccctaacatagtgtctgctgctgcctccctggggaccagragctagcccagtccctggagctgtccttcattccgttaggaataacactgcagccctctccmccctccggccagcgagtggtcaaggatttttataaaaatcacgataagattaagccttgtggtctctttacctggatgccagaaaaatcccctgtgaagcgtgtgtgtgtgtgtgtgtgtgtgtgtgtgtgtgtgtgtgtgtgtgtgtgtgtgtgtgtgtccccatgtcctagagtgctggagccctagcacctcactctccaccttccttgcacatagttgagtagggcaggggtatctggagagaccaacgagaaataaacccctctgtggggtggcactgagagctcacacccgccagccctggaggccccttcccctgagaggtggacctgctgagtggcccgggcttgaaagcacgcataccacagctcgtatgggctgcctgcttttactgacacgcagaggatgaccaaaagcctctgaggggagtggaagcagggcctccccagcattgtaggtatgttggggtccaggggataggggcagtcgagagggcttgggttcaraaraagcccagctgctttttctcctgccgctgcctccacgtggccatgctgtagaattcctycttggatttcccaaagatatcttggaagtcagagtctgagagatagaactgggcaggggagagagggggaggtacagggtagggtgtcatctgagcccagaatcctgccccactcagtagtgtcagtcatccagggcttgggactcccgcatctgtttgcccaccaccccagctagaagacacatctcccggggcagttgcmcactgcccgccaccagtggatcctgccttgggctcctccagctcagtgtcagatgcactagtgctggggcagtgagggggtgcccacctccctgcgggcagggtccacgccctctggcaggtcctcaacagcctggtgcatcagttgttcccggcgcaggcccccgttgatcgtggcgctggtgctgctgacggagctgctggttctgctgccagccgacttggggcttcgcaccagatcattmtmtgagctgtcctgggagcccttgagggcctgcagggccacggcacctgccctgccattgcccggccatctggatagccgsaagttgttgacttcctgtccagagaggagcctcaggctggggaagatggggaatcagtagcccacagggaggctgcactgaacccacaggcctcttacctccaactgcagcccctcccacttacaagggcctggcacttcccctgcccatcaggaccatgctgtcggagcccaggccactgtggggaaggctaggggccccaggactcactgctgttatctcagagatggttgatgctgctgccgggctgccatccaccacttccttgtgrgacgggtggctctggagcaagaatcggggcaagtatcagggccagggcaggagaagggggcaccaatgggacacatgaggggcctgaggacaagaccaggtctctcgcacacactggcaatccccagccagggcagtgcctcctcattccattggcccaggtcaggttcctctccccacaaattagggtagggctgggggtttcaggcctcactcacagtccacttgtaggggtcccaagtgaagaaccatccaatgaaggtgggaggctcatggccctgcttgaccagcacgatgggtgtggccgggctcctccctgctgggtgagtcttcaggtactcctggccccaggccaccgcctccttccactcacttgcagcttccccaagccacaggaagatctgagccacagaggggacctggccttgggcaggtggaggggctgcccagagctgaccccttcctgtccactccctgtccagttgtcccagacagaaccccacatacacatccctggccaagcagacacacccagcaagcggctgtacccacacacccgtgaacacacgagaaggtcacaggaatgcatgcatacatgcacacacacgttcaatccacacattttttttttcttgcatgatttacctggagatcaatccacaaatacttattgagcacctactgtgtgccgggcattggtctaggctttggggagtcaacaatgaaagaaaatggacaaaaatccctgcccttatagagctttcatgagagagcaagtcacatgtatgtctggaggaaaagtgtcctaaccagaagaaacaaccggtgtaaaagccccgaggtggccgtgtgcccggcatgttcagggaacacaaagaggccattgtggctgcagcagaagcagtgaggggggagcagggggaaattgggtcaaagagttggggctggccaggtcacgtagggctgtggtaagagctctgggtttgttctgagtagatgggagcacacagcttcatcaccaattcaaacagtgctgtagacacggccccacagagatgcagagaacacacattattgcagcttacacagacacacagtcatccatcgccacacagccagacagcaaaccatagccacacactgtcatccactgttgtcagacacagagctgcatgcaaacacaacagcacttgtttacacagccacgcacacccggccagttataccactgtgcgcagaaacacagacccacaaacacacccatccatcattcgcccacagccagtcatagtcttgctcacagacacattttcaccagttgccactggtctggccagttctagcatcacgtgacctcacagtcactgacaaagtgtcacacacaggtgcacgaaggcaaacactcacaccaagccacacacatgaatgatgcgattgggcattccaatcacagtcactcatgcagcaccgacacatgctcggccgcaggcactgtcgctggagccacacatagtatcataaggcacacagggccacacacaactgcaaacatggtctcagttacccctgagttccaacacactcctaatctcccggagtctcactgctgccacctggtgatgcacactcatccatggtctcatatgcaccgcaatgcaattgctcagtgacagggtcagactcacccacagccctgtgtacagaggcagatggctagatacacacacacccagttacacaaacagaaacacacccccgttcacagccccaccaggcagggatggccaccttacctcctgccaggtgtccagtaacatgatgtcatacttgtccaggtcctcctggctgaagaaccccacttctgcgaggaccaggcagcccatgtggctggagcactcaaacagtcgtggctgsaagctggggacctcctcagggagcctggccagcacggacagcaaggctgtgagccacccagaggggcaccccagcccatggcacaagtgccccaccccagggcctgggaagccacttctcaggagtgggagccctgggccctcctctgagccccgtggtttctccccgagcactccgctctgctctgggtacagggtccctctctgctcatggagaaagctctcgccccacccagctgtgacgcaaggtgccccatgaatttccctaggagagggctgcaggggtaggggagggcctgagctggagtctcgccctccctgggatgggaggagctcctcagcccacccctggcagagagtaggtctccggcccaaagtggaaggaggcaagccaggctgggagaaggagacgggagtactgagctcaggagaattgtggggagtgcagcacataaaccaagccccacaggcagaccaagagcgaccaggactcagctccctcctccccttgaggcctcactcctacctcctacacacaccctgtccacttacacaccacacacaacaccctgaatacacctgttcttgcacatccacacacactgtatacccacacatcatatgacactgtatacacacacactgggcaccgtgatccctgaggactgtagggtggggaagggtgctttgtcccctggcccaggaccaggacaatgcagggaggggatgctgccagcagaggtcgccactgcccccactctccccagcatctgagagacgcaagttacccaggcctgggagcgaagcgtgggctgtacttgtgggagcctctgtgagtgggaaactgagagtccttggttctagtctcgtcttgccagctctctgtgtgaatcccagtcacccaccctcctctctgggcctcaattcctcctctgggtaagaacactctcctcccaaccctgttacctcttgttgctggggtagggggcccggcctcccagggcctcccagaagtggggaggctcctgaccctccagcaccgtttcctcattcttcctggaaatgacagtgaccaccacccgtgccatctcacgctgatcaccattacagccctagcaggcaaagagatggctcaggccctgcatgaggaggggccttcacctccggccccacgtcccrttcacagggtgtatggggtggggctgggcccaagtcacaggaggcctaagctgacagcaggacaccagtgaacaaggcatcttcctcaccctacaggcctgtgtccccagttgatctggatcgcagggtctgggaccctcgcagggtccagagcatgggataggaggcccccaggcttagagggtcagtcatagtttatgctgaatattagagaaaactccagcaaactggcataggcctccccttttcccaagagacctgggaagggacatgccctgtgctccaggcagtaaggaggggaggcggcctgggcctggctctgacctgcggactctcaggtccacctgtcactttgtaactttccccaagttctagaggggaccctgtggcttcttcccctccccattccccccatcggcctatctgaggctggactcaaagtctgcatgccctgtggagaggacccacccccagcctggcaccactacatctgggcatgaatcaagtggtcagtgctgtgggtaccttcccaaaccagaggtagcagacgctggctgtgaccagcaagaagatgtcactggagttgagggatgaggcacgggctggcacctccatggtcctggtgttgtggctgtcagtgccttgcacttggaaaagccttgtggtggatgctgactgcccctttccrtggtgcccagctctctcctataggagagcaaggcctcaggctgggcaagggctcccaggggcgccttcctgtcccagtgtgggacatattgcctcagagctcagggacccttgcttgaagccatcaaggccctcactggtgatttcacatgaggagtacaggaccctctaagtgtggagtgcaggaatcccatcagtctgggacagggacagaccctttttaaatggacctttccccccatctctgagtggttggggcatgggtgctcaggccttggaggtggaaagtggggaccaggtttgctagtgtgcagccccaggcaagcccctggctccctttcaactcaaattcctcatctggctctgggactggggagggaaactcaggcagggggccaaccttggagctcctgggccttggacaagctctgggaaactaggggatgataagcaggccccaggcccaaagagaaggtgcttagaagtgtgtgcgggggccatggcccatgcagaactgggcaggctgtggccagagtggcaaggtgagacctacctggaagatcaccagctggccctggaagatggcgaggaagtgggggggctcgctgcccatggtcacatgctcctgtactaggacgccaccatacatgacatctagttcctcagcgttgctgttcagggcctcaatctcatccgcagtggcctggtggccctgcaggtgggggcagtgagtgagggcctggcccagctctcacatttcactcccagagcccagcccttgggctttaaggtgagtgctgcctccctcaggctggcacacctgccataggtacaggatgtactggacacggcccagcctctggtatgtgtagagcacaaggtagcagttgcctgcacacagct

SEQ ID NO: 96124 - DNA, 28101 bp, Homo sapiens
  misc_feature (1)...(28101): n = A,T,C or G
caggctgactggttcaggtcccgctctgtcatctccaagtgtgtggtgggattctgaacctgtcttggcctcagtttatgttctttatgaggtaaggaaaaggtactagcttattgaattcttatgagagttaaaaaagatgcctgtggactacacagcattgtgcctggcacacagtaagtatgcagtcactgttattattttaaaaattagctaacttctctcacggtgtcctcccaatatgcaccttttgctcctagtgtccagatacctagctttgtatcattattttttctgatgcccactttttttcttttttaaatgtctatagcagttttattttattatttattttagattcaggaggtacatgtgcttgtttgtcatatggatatattgcatactggtggagattgggcttctagtgtacctgtaactcaaatagtgaacattgtacctgataggtaatttttcaaccctcgcccctgcctctactcctacctttgccccctttggagtcctgggagtctgttatttccatctctatgtccatgtgtacccgttgtttagctcccacttataagtgagaacatgcaatatttggttttctgtttctgagttagttcacttaggataatggcatccaactccattcatgttgctgcagaggacatgatttcattcttttttatggctgtggaatgcctgccttttctaaaactttctggtacttccaccttgtccacaaggagtctccctccctggagttaccaccatctccaccaccccaagttcactttgcatgacttagcacttagtcatttattgtgtttgttgaggtttcattattggtttcttgacagccattgggggtgggagcactatgcatcctatctcccttagttttgtaccttgagcagagctgattatacagcagttgcccaataaatgttgaggacagtggatagagtgatggattttatggtctaggatggtgaccattaatttaacaaatatttatagaatgccactgtcctaagtgctggagatacagcattgaacaaaacaaagtctgaagactgacttgtggttcttatttccagacaaagccctggacttccctgggttcctggacatgatggcacctcgactcaggccggtaagggcccttgccttggaggagattgtatgtagaggggttattccaaccagtcctgttttgtctgcagggctgagggaatagacagggatacccttaagggagaactctggagcactaactgtgtgttccctacagatgcgtccaccacctcccccgccggctaaagcccyggatcctggccacccagatcccctcacctgaaggccagggaagccttgacccccagtgatgctgctgtccctatcttcaagctgtcagaccacaccatcaatgatccagagcaacacagccaaaagctggaatcgcccttatttccaccctcacctccaagggtggaaacttgccccttcccatttctagagctggaacccactcctttttttcccattgttctatcatctctaggaccggaactaccttctcttctgtcatgaccctatctagggtggtgaaatgcctgaaatctctggggctggaaaccatccatcaaggtctctagtagttctggcccacctctttccccaccctggctccatgacccmccccmctctggatgccagggtcactggggttgggctggggagaggaacaggccttgggaatcaggagctggagccaggatgcgaagcagctgtaatggtctgagcggatttattgacaatgaataaagggcacgaaggccaggccagggcctgggcctcttgtgctragagggcagggggcctacggtgctattgctttaggggcccaccacgggcaggggcctgctcccagctgccacgctctatcatatggagcgaggtgttggggaaggcggggcaggcagcctgttgcaggcaggggaaggagaagagactgaggggctgtgacctctcctgaggcccccagcctgagactgtgcaactccaggtggaagtagagctggtccctcagctggggggcagtgctgtccagtggaggggagggctttcacgcccacccaccccctggccctgccagctggtagtccatcagcacaatgaaggagacttggagaagaggaagaataacactgttgcttcctgttcaagctgtgtccagcttttcccctggggctccaggaccttccctacctccaccaccaaaccaagggatttatagcaaaggctaagcctgcagtttactcggggggttcagggagccgaaaggcttaaatagtttaagtaggtgatgggaagatgagattacctcatttagggctcaggcagactcacctcacatactccctgctccctgtggtagagacacctgagagaaaggggaggggtcaacaatgagagaccaggagtaggtcctatcagtgccccccagagtagagagcaataagagcccagcccagtgcagtsccggctgtgttttcctacctggtgatcagaagtgtctggtttgcttggctgcccatttgcctcttgagtgggcagccctgggcttgggcccctccctccggccctcagtgttggctctgcagaagctctggggttcccttcaagtgcacgaggggttaggctgctgtccctgagtcctccattctgtactggggggctggctaggacctggggctgtggcctctcagggggcagcctctccatggcaggcatccctgccttgggctgccctcccccagacccctgaccaccccctgggtcctgtcccccaccagagccccagctcctgtctgtgggggagccatcacggtgttcgtgcagtccatagcgcttctcaatgtgtgtcacccggaacctgggaggggagggaacactggggtttaggaccacaactcagaggctgcttggccctcccctctgaccagggacatcctgagtttggtggctacttccctctggcctaaggtaggggaggccttctcagattgtggggcacattgtgtagcctgacttctgccggagctcccagtccaggaggaaagagccaaggcccacttttgggatcaggtgcctgatcactgggccccctacctcagcccccctttccctggagcacctgccccacctgcccacagagaacacagtggtctcccctgtccgggggcggctttttccttccttggagcgtccctgacggacaagtggaggcctcttgctgcggctgcaatggakgcaaggggctgcagagcccaggtgcactgtgtgatgatgggagggggctccgtcctgcaggctggaggtggcatccacactggacagcagggaggaggggagtgagggtaacatttccatttcccttcatgttttgtttcttacgttctttcagcatgctccttaaaaccccagaagccccaatttccccaagccccattttttcttgtctttatctaataaactcaatattaagatgttagtgaccatatgttcttcctcccagggctgtttgctaaaaagaacactgcttaacccaaaggagtggcactagaggtgaatgttaggcttgatgatatctagatgagagagatggtttgaaggaatcgcgatttctacaaaacaactttcttcctataagttagccagctttgcccttcccccaaccccatacatgcaaggaggctgggagaggattgtgctggaggagaggatactctccaaggcaagctaagtcatgctggcccttgtttccagctcacctggacagctgcactgtcccttctccttcactgtcccccagcatctccttcaaggcctcagcattggctgagggaagaaggaaaagagggagtcagtggaggtggaggtcagggcaagagaaggttggagaagasggagcaaggggctatgctagacccaccttcattctggatgatgcagcgaacaatcctctctactgtgtcctcattcatgtcatcgtcctcagctgaaggatgaaagagattggcaaggaagcaggaatgagtcagctttgggggaatattacctggtggctcccatcatttattgcttaggacatacccttttacctacttgctatcatgctggacctcagcatttcagggaccagaaaagatggggacaccaatgcaagcccaagactaccatccagaggaccgttcctgcccatgctgctttctctagttttgctttcagagtggtgtcaccccacttgctaactcaagagtgcatcactaggcttcctgagcaggtttgatcaggatttggcctgggtctgttggtcagggaggcagaggtgtggggagaagggtgaaaggtgactgagccagggttccaggctcctcactcacggggctgaagctgggcatcgtcaggctcagagcccctmgacgtgcggcagcggtagcccttcttcttgagcacgtggcagatcatgaagcctaccaggcccatgaggaagaagaccagcacaagcaggaagagcatatatagcccatgttggggcggttccaggtcaggctgtggttccgacatgaggccctggggggcgagcgcgggccagggcgcctcctgggtttagggggctgcagctgggaatgggggaggggtargaatgccgtcctcaggatctgaaacaagcacgtctaagacgtccggctgaggtccggccccaccccctacccaaccagggagctgtccgggccaggagtgctgtttcgcctttcggcaagaggtcagcggcaacgcaagctctctaccacgaccctggtcccgcttccccgacgccccgagcgttcccctttccagcttgttcgcgcttctgtccctcccaaggacactgcagcacgagatgggacggcattcttaggcggcgggagcagaaatcctgcctgagtcagcgcccgcacctcctccacgccggcctgagccaggcctctgcagccccttcctctcagtactcccgcacccctctccctttttggtttckcccaccctgaccacctggccgacccggtaccggtgatttggttctggttccggcttctgctggggttccggctccaggggcgtcctagtgcggctcagggcccccgacgcccttccggcgctcatcccttgattcmtcccctcccccttcgccgcctcaccggccccgggctgtggctgcggatacccgcgccgtggcaggcggggggagggaagaacagagaaggatgcgggctggctgagagcggtggcaggctccgggcaactccggccctgggtcagggagatygcctccgcagccgccctggcttcccaaatgccttcacccgtcgcgggcccaggaccagggggcggagcgcaggtgtgcggggcggagagcgtgagctctgcgcgcgcgtgactgcgccgggcccccccggggcaatgtgcggcgccgagtctgggtccgggtaggggacaggcggtccggcgtgggtgttgtccactggtctatccggtacgcctggcgcagctcctgccctcagatgccccgaccgagcggagagtcaggaatcttctccgagggctgggggaagccggctttccgcacctttgagggacggagwggcgggatcttcggagcttcctagagaagtgaccacggcctgcgcccggtttggggcaagcggctggatgggatggctcggcttcccgaggatctgacccccggccggagacaaatggccctcgcatcctaggagctatgctgccagttccctgcccaacccgggacgctcaaagccccagataccgggagagctgagccgggcgaggggcggagctcccctgggggcgtggcctgggtgtggatggaggcggggccgcaacgcccagttccgcagaggccggctacktgcttgcgcagcacgcacggccggggaggggctggcggcggccgcgggcggcgggcggcggagkygcggggcctgctcccgccggcaccatggccaagaccgtggcctatttctacgaccccgacgtgggcaacttccactacggtgaggaaacagggmtatgcatgaggrgttgggacacggaggttttgaggcggggttgcaactccaggggtgagagctgacgaactctcttctccccacccccaggagctggacaccctatgaagccycatcgcctggcattgacccatagcctggtcctgcattacggtctctataagaagatgatcgtgagttccgccgcctcggccgggggttggggggtggggcgagctgtggccgtagggataggtgggctggactgagtgcatgaagtgcgacccgcccctagagtatcggggagctggatagaagtcaccaggagtaccttgaaagtgcagggtgttgggggtggcgtcctctgcttaatggaaagtactttctcacctcaggtcggccaccctctgactgtaggcacactagcccttggcctagggttagcgtgatgtggggctggtttgaagacagaaggtgtgttcctcctctgcattttagagtgtggatagggccttggcctcaggaattagggttaggggagcggatatcactgtatcagggtgtgaggtttaccctcagttcccactcctcttttaccacctttctttacctccaaggagctagggctccagggtggaacgatgctgccgtctttgtaaatgtgtatgtgcgtgtggaacagaggcgatattttagatattcctttttcagcctggaatacctctacatggttctgcttaatcgctatccagtttttcatctaccagacatacacatgctgtcttcccagcttggaatttatggctgtgatatgggatagtaacagttaagccacgccaggcgtggtggcccatgcctgtaatcccagcactttgggaggttgaaatgggggggatcgcttgaggccaggagttggagaccagcttgggccacagtgggacccacatctacaaaaaataaaaataaaaaaagtagccatgtgcggtgggtgtgcctgtagtcccaactacttgggaggccgaggcgagaggatggcttgggcccaggagtttaaagttacagtgatctatgatcagcagcctgagttgacagggaggaccttgtctcaaaagaaaaaataagacaaaacagctaaacccaggctttatgtgttgctagggaaactagtgaacaatatgaatgaatgttcattgcttgtgccaaggcacagacaaatggactggtcatagaaaagactgaggtgatgttagtgcaggaatctatatcccttgagattgtttgcctgtatgtacctgtgtgcattttctgggagaagaaaagctctttcttgtgcagttttcaaagaggtgtgacacatccccctgaccttccaaagataataaatctttgattttaattagaaagttgacatatatcccatatatttgactccagaaagaagaatccagaggaaagaggacagaatcagagcttgggggaggagatgagcatggagagaactgggaataggagattccaaggaacagggcaggtggatcagggctcaaagttgagaaggtacgataggctgagctggaggtggaaaggaaaagaagtggtcttcagggggctcatttgtaataacttacctggttaatcggagtctctctactgacttaaggattgtgggatgaggggaatgctatgtttggcttcatatagtctccaggactgggttcagtatgggtggtctgagcctgtggagtggggctgaccctgcctgggttcatcttgtgtmtccatcccgaggtcttcaagccataccaggcctcccarcatgacatgtgccgcttccactccgaggactacattgacttcctgcagagagtcagccccaccaatatgcaaggcttcaccaagagtcttaatgccttcaacgtaggcgatgactggtgagggaggactgggagttttgatgtctaacagtttaatgccaagcccttcagtgaggtcttttggcagcagtgggaagatctcaaggggggcctacttgtcaatgcatcataattcattttatttgtttattcaataaatatttattggtcacttgttctaggcaggccctgtgctaagtgctgggaatgcagtgatgaacaaaaacaaaattttaatatcgtatttttgctaagtcttataaagaggaggtgtatgacagattatgagagtgtatacgtggaggattgtttagcttggtggagtggctggtcggtggggccttcctagaggaagtaaagattgagctgagatctgaaaaaagagtagaagtaatcagatgaaagatggttggagggtgaggggagaagtatagcaggcagtagggacaagtgctaagggtctgtggtaggactgagtatgactcatttgaggaacagaaaaaaggccaagtgcagagtatgaagaggaggtgaactgaattgaggctaaagaaataggaccttttaaaagcaaacagctctattatgaattggggtttttacccgtagagtakagggaagctatcaaagtgttttaaaaagcaagggatcttaagagggctatgggcagttaaaaaaacaaaaaaaacaacgaaggagtggtttgatatcattaggtttacattgagcttgtatcatccatagaagagtcagggttagaccctctggggaagagagtggacaacaaagataagccacactctactctatatccatgaaaaaatagtaaccatcacagctaccagttgctcaattctacttacttttgtttttaaactttttattagggaaaatttcaaaaatttctgaaagtgaagtagtgcagtgacctcccatacgtccatcacctagcttcaacgcttatgagcaaatggccactctttttttttttttttttttttttgagacagagtctcactctgtagcccaggctggagtgcagtggtgcagtcttggctcactgcaacctctgcctcctgggttcaagcgattctcatgcctcagactcccgagtagctgggattacaggcgcctgccaccatgcctggctaatttttgtatgtttagtagagatggggtttcactatgttggtcargctggttttgaactcctgacctcaggtgatccaccagcctcagcctccaaaagtgctgggattacagacgtgagccatcgcacycagctgagcaagtggccactcttacttcatctatactccctcatgttagattgttttaaagcagatcctagatgttatatccttttatccataaatattttattatgtatctctaaatgatactcttttaaaaaaacatagtatcattatcaaacctaaaaagttaacagtgattccttaatgtcatcaaatatgggatcaatattcaaatttctgcagttgtctcataattattttgtagctaatttaaatccagatctaaacaaggtctatacagtgcatttggttgatatgtctcttaagacttttaatttgtagcttttctgtcacccccttgaatttatttcttgaagaaaccaggttgttgatcctgtagaatttcttatgatagctaccatttactgagtgcttactctgctaggtattatgccaagggttgctggtaaatccacttaattctcataccaatccttagatgtattataatagacctttttctgatgttatatataagtaaattgaggtttgggaatatctaggtaacttagccgtagtcacataactggtcattggagggggcatgatccagatcccgggtttttaaaccactaatctgttttcctgaaagatcttaatgacagaagcagccagggctgtaggatagaggccaactcattaggctggcattggcacctttccaactttatccctacacctcagctgcacaggatgccttcctggaatgcccttagttctctattcaacctcttcaaggccttctcagccttcacaccatctccatgaaacctttcttgaccacaccagcccatagagctctgtcttgcacacactgcactgctcatttggtgttcagtcacatgctgtttggggaggtttcttgtttttttgttagtattcctgctgttatttctgagctcactttctagctctgtgaatacagggtcagcccttacgccacactggggtcccgtagatgctctttgtgcgattagggaatgctaattagaatactatctctgggctatttatgctgcatcagtcttcctgtcaaacaagttacagttgtgcttatctgtatttccgatgagaatcaggaatttttcttctgtttaatgaatttctgattggtttcaaagtattctaacataagtagccaaattgtactataggcctttaaatgaaaaaaataaaaaagtagtcccaagccgggcgcagtggctcacgcctgtaatcccagcactttcggaggccgaggcgggtggaccacctaaggtcaggagttcaagaccagcctggccaacatggtgaaaccccatctctactaaaaatacaaaaattagtcatgtgtggtggcacgtgcctgtagtcccagctactccaggaggctgaggcaggagaattgcttgaacccgggagttggaggttgcagtgacctgagattgcaccactgcactccagcctgggcaacagagtgagactctgtcttaaaaaaaaaaaaaaaaaaaaattccagacctctccttttcacccataaatccctctgcccagtgacagccactttcagctcctttcccctatgtcttctggtatttacctttggatttctaaataataatattaattgactgttattactaatctgtaatccttaggtaatacctgttatatactaggtactgttctaagtgctttacagccattagcttatttaatctcaacaacccctatgaagcagggtctattattgtktccttttaccgatgaggacacttaagcacagaaaggttaaacagtttgtacaacctcactatcattagtaggtgttaaagaacctaggtagtctagctccagaatcggtgcttgtaatcatactcccctcctgtattgtctctcattgctatttcttcrtctgtcaattttaggcattatctgttaagcttttagtatgggatatgagcatttagtcttcttacaccatcacattggcttcctttcccctttcagcttcatagtaatttaaaaataaatcagtattctgtgtttacattattataactctgaaagattcatttactatcaagccaaatagtgtagtgtgatttaatctattttcttctaaagctttttgtttttcctggagctgacaattgcattattttttcatttgcttagttttctggtattaatcactaattctttccaagccttttgagaaactrtaaaaccctacaattcttgcttgaacccgggaggcggaggctgcagtgagccgagatcgcaccattgcaccccagcctgggcgacagagcaagaccccatctcaaaaaacaaacaaacaaaaaacccctacagttctgtttttcacatggtcaaatgtatcagctgcactattttttttttttgagacctaaaactagggattgcctaagcctttcctttttaaaaagtcaggtttatataggtataacttgcatacagtaaaattaaccttttttaggtgtaagagttctgagaggtttgatagaatatatcaaggtatagggccagcgccgatggctcacacctgtagtcccaacaatttgggaggccaaggcgggaggatcacttaggcccaggagtttgagaccagcttgggcaacatagtgagaccctgtctctacaaaaaaaaaaaaaaaaaaggtatcaaggtacaggaaatttccactacccaacaaaggtcactcacccttttgtagttaataacttctctgcaacctagatccagccaactactgataagatgtctgtccttgtattttaccttttccagaatgttacataaatggagtcatacagtaagtaggcttttgtgtctggcttcaagcctttactttttataaagaataacaatggtaataattatagctgacatttattaaaggctgagcggatactgtatactgtgctacaggcttttcgtgggttatctcatcactgtttcacatatgtaggtatacagttctttctttaaaatatgtgactgaaaaatattattgaacattatgctaaaatttgttacactgagaagactaagaaaaacagagctcatgttttctttcaactgatttcctttttacattgtacttgagtacctggaagctgcttgcttctttccgcagctaggatacaaactccctgacagttaagtgcttctttacttcccatccagtgccttgcacagggcttggtacatggtttggtccaaaatatttgttgaataaatttgcagatagcccacgtgtgtaggagagggagagaaggttcttgaaaaatggagattggaggaatctaggatggggagggagatatgggaagggcccagacagaggcaggagggttccaacttgttcctcttccctgcagcccagtgtttcccgggctctttgagttctgctcgcgttacacaggcgcatctctgcaaggagcaacccagctgaacaacaaggtgacatagtcccgagtcctgttcttcctttcctctggatccctggactcgggatttaaccctgatcctgggctcccagcttgaggggtgggcaggaaggactgtgacttaggtgtttgtctttcagatctgtgatattgccattaactgggctggtggtctgcaccatgccaagaagtttgaggtgagtgaggaggtgatgggaaagacagtggccatcctagggtaggtgtttaggatgatggtggggggcagctgggaggggaattgctcttctctttatgagaccactgtcttgccataggcctctggcttctgctatgtcaacgacattgtgattggcatcctggagctgctcaagtaagtagcccaggaggagatgggggcagttacgggattcttggctgaggaggtctytcagtctcaaccctgaccttgacctccctcctccctgattagcttctcccaagttcttgatgctttattcaggckgcctcttccactgctgcagattccctactgcctgctcacatttcagccttctctgcatatccctctcctgtccctgcctctagsctctaggctggagcccccagttgcctttagggaactggtgacattaagtttcaggtgaccagggcagaagcagactcttcacaattcgagacccggtgtttgagaggagtgggttggggggttcacttctagctcagaccctggctttggcttccctctaggtaccaccctcgggtgctctacattgacattgacatccaccatggtgacggggttcaagaagctttctacctcactgaccgggtcatgacggtgtccttccacaaatayggaaattacttcttccctggcacaggtatgggaatagggattactttcccctttgcacccttcagctctttactatgagtgcctccttctcagccttctagtctcatctcaggtgtcccctcctcagagaagcctttccttaccactccagttatcataatcacctccttccccattcctctgttacatcagcctcattgtttccctcagaacactcactgctatttgtgtttattgtggttttttgttttgttttgtttactgcctccctcctcctcatggctattccctaagaatataagcgtggtgggatatygtaaatttcattagttccattcgttgctgcatccctactgcctagtacacagttggctcagagtggatcccccaaaactatttgcccaatgaatgcaagctgcaagagatttagtggctctagggagtttatggtgaagctacatagatggaatgagaggctcccagagtgcagattggggctgaaacagctgggttgtgggtgcttcccatgtgtggctaccaccacccacttccctacaggtgacatgtatgaagtcggggcagagagtggccgctactactgtctgaacgtgcccctgcgggatggcattgatgaccagagtaagtaccgaagtcttccctctgttccctaggccccttctttttctccttgaaataacctcttctgcctggtattgtctgctgttgggccagttgtccttaaggatgaatggccttcagagggaccatgaatctctggaaattgtatgcaacatatcatgtgtatgtgcatttttctgggaaaagtcattggctttcatcagtcactcatagcagtctgggatcccttccagaagtttcagaccagtgatttgattcttttgggtggcccctttcctgggctacatgctcgctcaaccccctttttccttttgttccctgtctccccatccccttggggtgccaggtgcccatctttggccctctcccaggttacaagcaccttttccagccggttatcaaccaggtagtggacttctaccaacccacgtgcattgtgctccaggtaatactgtcagttcctcctcaggagtgttctgcctgggcttggggaaagagagcaagggaagaggaggttctttaggttggtggtggaaggggtatctgtgatgttctgatcagttctgatcactgcactttcctggggttttgctttttgcagtgtggagctgactctctgggctgtgatcsattgggctgctttaacctcagcatccgagggcatgggtgagacttgctctccttcttctccccaaggtttttaagtggccttggacttcagtacgtgggtgggggtagttggggaatgggcctcacctcttcttggaaatcaaaaatagctacaaattgtacttgaactagaaatgtcatcttgaacagggttccctagatggtcattcattcacgatatatttttattaagcacctgttatgttccaggcatcataccacatcatggggatggaataaggagtctcccatggagtttacagtttaggaaacagacaaaaaataaataatcaaatgaaataaatagattcttataaattctgtgaaagaaaaaaagaaagctgagacacaggatacaatgggggacctacttgagatagcatggtttcggaaagtttttctgaggaagtaaaatttgagttgagacctggagactaagaaggagtgagtcataagaggagcagagagaagcctgacccaagcatggacaaaggcccacaaaaggctctgagggctgggcccagtggcacacacctataatcccaacacttccagaggccaaggtgggagaatcgcctgaggctaggagtttgaggccagcctgggcaacatagtgagagccatctctacagaaaataaaaaacaaaatcagctgggcatgatggtgcatgcctatagtcctagctactcaggaagctgaggcaggaggatcacttgagcctaggagtttgaggttacagtgaactatgattgtgccactggacttcagtctgttgaggtgaggtccgagaagctggccatggtgagattgtgcagagcctttaaaccctggtaaggagtttgaattatattccaaagatgatgggaaaccattgaaggattttaagcaggaaagtgacatgatccaatttgtgtttgaaagtgacaattctgactgctgaatagagaaaggtttgggtaggggggatggagatggaagtagaaagaccagttaggaagccatggtgttggttaggtgcccagactaaggtggagggggtggcaatggagagaagtagatgatctgagaggtgtgtgtgtgtgtgtgtgtatatatatatatatacacacacacacacacatatatatgtttttttttttcttttttgagatggagtcttgctctgtcacccaggctggagtgcagtggcacgatcttggctcagtgcaagctctgcctcctgggttcaagcatttctcctgcctcagcctcctgagtagctgggactactacaaaggcgtgagcaccgcgccgggcgtgagttatattttcaaggctagaattgacagaacttgggttgatgagaatagttgattagcaggcagggtgccagggagggtgttgagcagaacagaggggggactgtgctttattttaaaatttttattgagacacagcatataaagtatacccaaatcttaagggtataacataatgaatttcactatcaagataaagatttagaacatttatagttttcttgtgctcctttcaggcaatacctaaaggtatttaccttgtcttttgataacctcctccacatcttcctctggttccttttaacagggaatgcgttgaatatgtcaagagcttcaatatccctctactcgtgctgggtggtggtggttatactgtccgaaatgttgcccgctgctggtgagcactctcctgatttcctcccctgttgtccagtgtgagctagggtgtccctcagatatggccacatgggnccttcagcccacttggtcagcctgctcccctctgctggttggtttcaggacatatgagacatcgctgctggtagaagaggccattagtgaggagcttccctatagtggtaaggaccaccccacaacacccccataacaggaaggccattctcaccagattscagaatgacctggtttgaaggcacatgggaaattttacactctcagagctctgcagactaaacccctgggctcagagcagggaagagattgggcagctattatgtaggtgctctggatgggaaggaaaaagattgggaagtcttgttagctgcctttctcagtctgagccatactttctcctctcctccccaagaatacttcgagtactttgccccagacttcacacttcatccagatgtcagcacccgcatcgagaatcagaactcacgccaggtcagcagctcagaaaagctgagcacaaacttctcctgaaaggtggagcccaggagaggtcaaagatgtgggaagtaggaaaaaccaaagagaaggaagttctaagccatcacagtcactgttattgactaggaggcagtccagtttaaagtagaggcagttggggttggtggggagggagagctatcagttgggggacctgaactagaggtaccactgagatgaaaaccagtatggtaggggtaaaaggcagctaggagattccatgtcctgggaatctctggaaactgctcactctgtattcctcatttccaaccagtatctggaccagatccgccagacaatctttgaaaacctgaagatgctgaaccatgcacctagtgtccagattcatgacgtgcctgcagacctcctgacctatgacaggactgatgaggctgatgcagaggagaggggtcctgaggagaactatagcaggtctgggagcagggacttcagcctactttcaataggcttgctggggaggtttaaaagggaaaaagtaaatgggaaggtattagtttaattgcctctggcttacctcctttagtctgctacaatttcctcactcttttctttgttatttttaatgacaaaagtaacacgtatttattgcaaaattttaaaacagcaccaaaatatggtgttggcgttcacacaatcccagacctattccacaggagtaaccactgttaatagtttttattgttttggatagacctttttckatagattgcaaatatactattctgtatgtacatataaacaaacacatatacactcatttacagtttgtgtggtttttggtttttcgtaaatacaaatagggtcattctacgtatgctgctttacatcatatagctgttttcagctagctaatatagatctgcttcagtattttatcagctgtataataatttactatgtggatagattattttccatttttttggtattacaataataatgtggcaatgaacccccttacattatacatctttgcattcttgtttgagtgggttagatagtagaatggttgctgctaggtcaaaggctgtgtgcattaattttttttttttttttttttttgagacagggtctcattctgtcacccaggctggagtacagtggcatgattatagctcactgcaatcttgaactcctgggttcaagcgatcctcctgcctcagcccctcgagtagctggaatcataggtgtgcaccacgacacctggctaatttttttttttttttttttttttttttttttttttggtagagacggagtcttgccttgttgcccaggctggtctcaaactcctgggctcaaatgtcctcctgccccagccttccaaagtgctgggattataggcgtgagccactgagcctggcctaaaattttttatatttgctgccaaattgccgtccagaaagtctgtagcaccctatagtcttgccagcatttttctcagtctttccaggtcttgagctggacaggtcactgcctgcgtaatactctctaaggctctttgatttctttgctctgttaattttttcgggtgggataattgcattgtggttatgttttttttttttttttaaaagtctttatctttctgagatacatacaaaatatttgtagatggaatgaattaggggggaaaaaggataggatggaatttttttttaatcccaaaactttgctgaaaaatgaaagggaaagacaacagaaccaagaagtgcagaaacagatgcacttaatggggaacagatttccttacatgactgagggataaccacagctggacacttgtgggacacgctgtcttgctcccacgcagggttagaggtttgagccggctctgctgcagagcctgatgggcttctcagccccttctagaatctgcttctgtcttagaattcaggcctccgaatctctcctctggacctgggctttactgctctgactcttggggatctctgcaactctcttcctccaaggatatcccccgatcccttctgagtgaggaagtgtctgaacatctggaagtgtctggcttcagggcttccaggactattggaaattgcttttcattgtctggtttggtttggtaaaacctgtttttaagttcttccttttgggttttttatcaatagctccaggctggcatctggacctagtctctgcattataataataccaagccctgtcacagccagcagaagcctcaggcctcttcctgttcctaagccctacctctctgtcaggccacccactgagtttctgttcttctttgatgcctatagctccagcttgcatatgacttgcagagtagaaataggaagagttaccactttttgtaggtttgccaagcaccagacactactaagtgctatctattacaacatatatatgatcattctgttgccatcagacaactctgatggctcttattttcagattaacacgggaggaatctaaggctcagagagtctaagtaactttctttctttcttttttttgagacggagtttcgctctttttgcccaggctggagtgcaatggcatgatctcagctcaccacaacctctgcctcccgggttcaagcgattctcctgccttagcctcccaagtagctggattacaggcatgagcctccacgcctggctaattttttttgtatttttagaagagatggggtttctccatgttagtcaggctggtctcgaactcctgacctcaggtgatctgcctgcctcggcctcccaaagtgctaggattacaggctacaggtgtgagccaccgcccccggcgagacttaagtaactttctgaaggtcacatggctagttaaagatcagggctgagattcaacctgattctctgactccacacctttaaccctgtgcacttagaagtaactgagacattgctcaccatgcagataaggcctttcctggcttagtgcctcagcttctctttgatgactttctcaattctctgtgtcccagagaatactttttcttttctttcttttttttttttgagatggagtctcactctgttgccaggctggagtgcagtggctaatcccggctcactgcaacctccgcctcccaggttcaagcgattctcctgcctcagcctcctcagtagctgagattacaggcatgtgccaccacacccggctaactttagtatttttagtagagacggggtttcaccatgttggccaggatggtcttgatctcttgaccttgtgatccacctgccttggcctcccaaagtgctgggattacaggtgtgagctaccacgcccggcttttgagaatactttttcaaaaagaaagaaaccaatattgagtacctgttgggccctgttttgctttcacatccattctttcactatgggtttataataccacgtcactcttcttaaaattaaaactctcctttaccttgcacttagaagaaaatccaaaattttgactgtggcttaaaaaggtcctgcatgctagcccttacctacatccaggatctcatctctaactactctcctccatgcacagtgctcccggctgtcctggcctccttgttcttactggaatacatcagtctctttccatttcatgacctctgtagttggttttcttgcagcttggaatggccttcctgaagtctttgcctgcttagctcctcctcagactttaggtcttatgtcccaatagtcctgtctgaaatttcacccttttcctctcatcaccttcagtcctatcacttcattttattaattgtactctccatcatctgaaattattatatttatttactttgttagttactagtctcatttattaggtaagctttttgaggatagacaaccttgtccagcttgttactctactgtattgctaaggtttatgacagtgtctgtatagagtagttccttaatgtttatttgatacgtgaatgggtgaatgaatagcagtctctaccaacaagaggaggagtggttctcaacggggcctgagaaatggctttggaaaagggtgctgggagaagatyagaacttagagtgagatcctgacctctctccccttgctttgcaggccagaggcacccartgagttctatgatggagaccatgacaatgacaaggaaagcgatgtggagatttaagagtggcttgggatgctgtgtcccaaggaatttcttttcacctcttggttgggctggagggaaaaggagtggctcctagagtcctggggktcaccccagggcttttgctgactctgggaaagagtctggagaccacatttggttctcgaaccatctacctgcttttcctctctctcccaaggcctgacaatggtacctattagggatgagatacagacaaggatagctatctgggacattattggcagtgggccctggaggccagtccctagccccccttgccccttatttyttccctgcttccctcgaacccagagatttttgagggatgaacgggtagacaaggactgagattgcctctgacttcctcctcccctgggttctgacttcttcctccccttgcttccagggaagatgaagagagagagatttggaaggggctctggctccctaacacctgaatcccagatgatgggaagtatgttttcaagtgtggggaggatatgaaaatgttctgttctcacttttggctttatgtycattttaccactgtttttatccaataaactaagtcggtattttttgtacctttcgcctttctaggaatgttaattcttgctagtttcctatttatgaaaggagagggaaatgggcatgatgatgcatgtaataaaagcatagttaacattcattcagcacttatcctacgttaggccctgtgtatgtattctacatttattattgtaaatataagaagttaatagaggattttggttaagagttagacaaacctgggcagatttgagaggagtagaagatgacttcaggtttttgaatctgggtgtttagagtagtgatgctagttggtgaagatacactgagataaaacatgttaagtgcttagcacagtgcctgacagaagaagttgcccattatctgtctatgtgaagaacaatgctaaatactgtagtagccacaaacatgaacctttctctagaagagtttacattccagtcagtagtatgataaatattgtagcagatacagactgatacaagaaagaggactgatagatgggtcacttcctcccctccattctctgattctgtctgttctcaacactagcttagaaagtagcttttggactttttagacaaaatgtctggaaagctcagcactaagtcaagtttgaagtatgggatggacagctctatgtaacattctatccgatcaccatcagaaggtctggaccacaagagagatgaatgccaaatttaggagccagccagcttggcagagtccctggtatatctcaggcccttgactaggtactggggctctagagtaagtaagtcactgactctgcccttcaggaacttatgcttgaaatcttgctagctgtggtcaagaatattcagtccatattgtgaaggccgactggtagccacgtaactgtcacacaagggacagatgtagctgggagaatggatgaaattgcttagggagaaagtcatgctagaagagcaaagaatatactcttggagaatactcattcttttcactcatgtttggtttatgtcagtggggaatcctggttaaacatagggtttggcagcaaatcagactaagctgggtttaaattttatatcaattatgcgttcttgggcaagtcacttcaactctcaaaagtccaaatttactatttataaaatggtgaggctagcagaatctatcacatgggactgtggggacttagaaaaatacatgtagagtgtttgcctagtgcctagcagagagcaaagggcatggttaagtggtaactgttattgctgtttaggcacatgttggcaataattagtttgtcctgattagaaacaattagatggtacctaacctggaattcgaactaggaaattaaactccagagcgagtctggtttagtctagtgcttgccctggaccgagctctgttcttgctaccttgctttcaaaacatggtggctatcactataatttttttcatgtgttccatgggtattgcacacattgaaaactgcattctcttggaaaacctgtcactaattttctgccaggataatggtctcacgcgatttttggtctgggatgtgagagggtccaggctgtcaggctgtacagccacgtgggcgctgcgtgggagccagaggcctgcgctgctccaaccgccagrgggcggtgytctccgccgcggccgcggagagctgcascgcccactcaccacccccccccacgtgggtccgaatggttaggtccgmtgggcaggtagcgcgcttccgcggcttccctccgcccctctcccttcccccattggtaggggctgcgggtccgggcggaagtggggcaggcgggcgggagcgaggcgtcgtcgttgtatattcatgaggcgcgcgcagcccggcatgctaatgaggcggggcgcggcggctggctaaagagcgactgggcggcggcgggcgcggagctgccaggcgggagcggcgtaggcgcggggtcgccggccagcgtgaaccgggacatggagccgcccggcgggagcctggggcccggccgcgggacccgggacaagaagaagggccggagcccagatgagctgccctcggcgggcggcgacggcggcaaatctaagaaatttgtgagtgtccctcycatcccgctcctgcctggccccgtaaccgccctctggacccctgcagccggcccctggggcgcctgcccggctttggggagccgcccccgcgccttccttcctcgtttcgctcggtccgcagctctgcagcccgacatcctctcccttcgggacctcgggaagccccggaatcccacccggctcttgccccggccacctcggggcttccctcgttccccagcccttacattctgccctcccgcccgcatatccccggccggctctcagccccgtctctcccctctcagcctcacttcctttcttcttcctccagtacccgaacacgcctcctcttttttggtcccctcttctgggtccattttctcttcttaaccttacaccttttttggtattctcgtatttccttctcctaaaggtcacttccttctccatgattcatcctttttacctgctaactttcctcccgcccagtcccccgtgggccctccgcccggtgtcacttgataatccttcccctgaggaatgttacctgacttgagccctacccccaactccttctttggacgtttgtccttgcgattacaggaatgggctcctgcccaggtcctatggtcactggggcatgacgtttatttgtttaccagtattcctctctccagagaacctctctctttgccctgttgcttatcacttttcagaggattagaactctcatgattgtgcccttcttgacctaggatggtgataaacctctcctgtgggaagaaagttggactgcgagttcaagaagtttgtaattgaattgttttttatacatttcccatgataaccgtctcctctactccttttctactgcctcttgtgccccaaggcgactatcggcttccctttgcgtgcctgtagaagagtaagctttcctcaagtgccagttactttcaatccgagtgaaggaatagtgatatacatgtaaccctatcatatttcattaccttttgcccacaccaacgcctctctccagggagccgtttggttgcttttttgctataaaagctttgtaagatacggggcactgtccaggagaggaaaagtcttggatattgatgatcattataatagctagttataactgtagctcttttgtcttctcttccaggtatttatgcccttacactagtgtatctttctactaaacaaatggcttgtaactcttagtcccacctcccaacattttgacccagctccacaaatttgggaagaaaactgataaagcgatggaaacaggaagaaaatgttgttttatgacctagagggttgagatgttaaccctggagggttagatgtttaattctaaatagaattaaaatagtgactcatctcttcctatttctagcaagaccaagtgctcctggactgccctttccagtgatatctgagatgtcagtaaccatctgtttttatctggtgaacatctttttttccccccctagaaatataaggttaagggtattgacaccccctccttctttggtgactaaagcagcatttttgtatgtttctttaggataagaattgacccctcccccccgttagctttccttccaaaacttaagttctagggctcatattccttctatttctgtatctttttgttttgattttatttccatgagtactgtttgaccttcctcacccaaattccagctattgctgctgacttgtggtgacctcagtgacttgttttcatgtcttgagtagaattttatatgtactctattttatctaacaattatttcacgaacttgtgaagtctactatgtgtgtggtactgtaaggtgagaaacctgaggaagctcaaccccttttcacctgtcttttggaatgtccatgaagtcttctatatgtttaatggatttggctcagggttgtaggtatttgctttagagaggatggagctgaaccaagttctcttttctttctgcggtgttagtcttaacccttaatctgctgaatttttaaaactaaatagctcargtaatgaggaaaattgcattagtagctacggaattggaaggtttctaggaaagtagtgctgcttaacccttttattgccaaatgtaacctatctcaaggcatcagaatattctttcttcctcttgctccttttatgagaactctgtggaaatgagagatgaggaggagcattgcaatccacttctctttgtgtctgtgtatgtatacgtgggtgggtggagtgggcgagattgctggtgtgcttttgatacccgtggcttagttttcttgaactataggctaaaactgaactcaaaggtctttcgccgcctccaccttttctagagtatgtgtcctctggaactccattaagaatgtactgtataaaactgcactggtttggactaagtgtgcccgaaggttgtttgcatttgagggtttataattcctttagctgctacatacctttcctggcttatgcaggttctaaatacggattaactggtgagaacacagagctcacaaattgtctgagatctgctcttaccctctgaggcatcttgtgtggaaaggagatggaccctcagtttaaaagtggttgggcatcatcttttaaaaacacatgattgttagacgtgctgacagtgagtggctgaagccaggctgcctggtattaccccttggttcttcatgagtctgtcttctcctgggccatgagcataccccttctccggcattattccatttcctttcacaagtccttaagatgaaggaaaataaaaattttaggtgaacagagggttttctgacttttcagcagtgatcaatgtgggtgtcaaatagactgatttccaaaatatacgtaaggggaataagtagaaccgggatgttaggaggctgcagagtattcttacatttaatagactttgtatgcactctcatataatcgagaaagtgatgcattgtaagagagaatattgcttcctgatttaactaggagcattagcgagaattttttttttctttttttgagatggagtctcgctctgttgcccaggctggagtgcagtggtgcaatctcagctcactgcaagctccgcctcccgggttcatgccattcttctgcctcagcctccccagtagctgggactacaggcacctgccaccacgcctggctaattttttttgtatttttagtagagacggggtttcaccgtgttagccaggatgttgtcgatctcctgacctcgtgatctgcccacctcggcctcccaaagtgctgggattacaggcgtgagccaccgcgtgcggccctttttttttttttttttttttctttttctgagacgagtcttgctgtgtccaaggctgcagtgcagtggcgcgatctcggctcactgcaacctccacctcccgggttcaagcgattctcctgcctcagccttccaagcagctgggattacaggtgtacgccgccacacccagctaatttttgtatttttagtagagactggtttcaccatgttggccaggctggtcttaaattcctgacctcgtgatccgccagcctcagcctcccgaagtgctgggattacaggcgtgagccacctcgtccggccaagagaatgatttttactattattaaaattattaaaattagtttaattttggattcctatattgagttatgatcatgttgcagttacacggtcttctaaatgcaaagtaatagagtataaatgtttagtagtagactcctgtccaaaaggagacaaattaaaggatgccaggcagaaagaagtggagttgttcgtgcagatttctgcttatatcctcttaaaacattaactttaatccaaaagtttgcagaaaactgaaaaatatacagagagctttgcaaaagtttgcagaaaactgaaaaatatacagagcgctttgtacacctttttttttttttaacagatgatgaacgcaaggattatatagtttggaaagagggaggggagcctacag

SEQ ID NO: 96125 - DNA, 28432 bp, Homo sapiens
gccgaggtgggcggatcacgaggtcaggagattgagaccctcctggctaacatggtgaaaccccgtctctactaaaaatacaaaaaattagccgggcatggtggtggacgcctgtagtcccagctacttgggaggctgaggcaggaggatggcatgaacccgggaggcggagcttgcggtgagccaagattgtgccactgcactccagcctgggcgacagagtgagactctgtctcaaaaaaaaaaaacaaaaaacaaaaaacaaaacaaaacaaacaaacaaaaactacgtgggccacacaacttatctgggccacagtttgtgggtgctaggctggagggctgggttcaggggtcctctggggctctctgggcattttctgctctctaggatgggggctgctgctccctgcaaagcccccccactccagacctatctcctgaagcatttattggctttgctccactccagcccctctctctcttctcacaaaccagagctcaccccttgctctgcaaccacagtctaacgggattccaaagacagggttaggacaaggccagcgccagagacctcagaacccttttgctctgccaaccccgaaattccatctcacatggtggctcctgggccccatcatggtaaactggagctcatgcctccaactgttcagggcagagctgggctgtttccagatcctctacccactgtgtgcggctggcccccatctaccactgtatagaagggcactgacaccccaaggagcagcagcagcacaggttggagctgtcctatgtccacctggggtctctttgagaaggatgcaagatttcttgcttgactgacagatgtggaaactgaggcccagaagaaagcagcaggtttgccaagactgtgctacctcaccttcttggaggagtgctactacaaatagttcctgggagaaggggtcctggtgatgagtgctgcgttctctccctgagtccactcgcccgcctgccaccctccaccgtcgcaccctgcaaacccacccctctcctgtgctagaacttgctaacaccagtaccatgccctaccaatatccattgctgaccccggagcagaaggagctgtctgacatgactcatcgcatcgtagctctgggcaagggcatcccggctgcagatgagtccactgggagcactgccaagtggctgcagtccattggcaccgagaataccgaggagaaccggtgcttctaccgccagctgtggctgacagctgacaaccgcgtgaacccctgcatcaagggtgtcatcctcttccatgagacgctgtaccaaaaggcggatgatgggcgtcccttcccccaagttatcaaatccaagggcaatgttgtgagcatcaaggtagacaagggggtggtacccctggaaagggcaaatggtgagaccaccacccaagggctggatgggctgtctgagcgctgtgccccatacaagaaggatggagcccactttgccaagtggcatcatgtgctgaagattgggaaacacaccccctcagccctcaccatcattgaaaatgccaacatcagctgggcgcggtggctcacgcctgtaatcccagcactctgggaggctgaggtaggtggatcatctgaggtcaggagttcgagaccagcctggccaacatggtgaaatcccatctctactaaaaacacaaaaatgagctaggcgtggtggcacacacctgtagtcccagctacttgggaggctgaggcaggagaatcgcttgaacctgggagacagaggtcgcatgagctgagattgcaccactgcactccagcctgggtgacagagtgagacgccgtcttgaaagaaaaagaaagaaaagaaagaaaaagaaagaaagaaagaaagaaagaaagaaagaaagaaagaaagaaagaaagaaagaaagaaagaaagaaaagaaagagaaaatgctagtgtgtcaatgtcctggcccactatgccagcatctgccagcagaatggcattgtgctcttcgtggagcctgaggatcctccccagtggggaccatgacttgtagtactgccagtatgtaaccgagaaggtgtggctgctctacaaggctctgagtgaccatgacatctacctggaaggcaccttgctgaagtccaatatggtcaccccaggccatgcctgcatccagaagttttctcatgaggagattgccatggcaactgtcacaagcactacactctggggaataagcggcctagaaggatcacaactgggccagaacagggcccacccagactcatcactgaggcaggtggggtcattctcacttcacagacacaaaaactaagtgctgcactgcacagtgtcccccactgtccctgggatcaccttcctgtctggaggccagagcaaggaagtgtccatcaacctcaatgccattaacaagtgccccctcctgaagccctggggcctgaccttctcatatagctgagccctgcaggcctctgccctgaaggcctggggcaggaagaaggagaacctgaaggctgtgcagaaggagtatgtcaagtgagccctggcagatagccacgcctgtcaaggaaagtatactccaagcggtcaggctggggctgctgccagtgagtccctcttcatctttaaccatgcctagtaagcggaggtgttcccaggctgccccccaacaccccaggccccatcccctcccacgctctcttgaagagggggactcctcttcggggctccaggctggcttgcccgcgcgcttgcctccctcgtgacagcggtgtgtgttgtctgtgaatgctaactccatcaccctttctagcacattgctaataaacagctatttaagggagaaaaaataaaaataaaaataaaaatagttcctggggcccagaataaaaagggggaattctaggggctggggttgacattttccttttgccttgaccattgggtgggtactatgtgcagcagccccggacggtgatagtgatggtaatgatgaccatgatgcagactgggtgggagggaaaaaagtccccagcgtcatccctgggatggggcctgaccttgcctcaactccagctgcccagggccagagcgagtgataagatgagtttatactgtagctctgagaaggaagggagggagggagaaggagggaaggagggaaaagggagggaggggtaagggagagagaaaaagggagagaaagggaaaagaagatggggaaggagggaaggacaagggaggagtgagaggcgaagaaggagaaggaaaagaagaaaaagaaagaagaagaggaggagggggcggaggggagaagaagaggccccgaaggatcacaactggagcagaatagtgcccacccagactcatcactgaggcagatggggtcattctcatttcacagacacaaaaactaagatttaaggcatgaggcaatttgctcaagatctcagagttaggactagaactcatggcttatgccttgctcttcaaggtctcaaaccttgaaccactcaagaaacatattccaagatacctcacccttacctcatcagaaaggggagctggttaaaatgcagatttctgggtcaaaatcaaaggtgtgtggcacaggaatctgcattttgaccggtaccctgggggtggttctttgggccctgacactgggaaaccccgtggctcatttagggcctttctggtctgacctcttggcgtcaggtcctgaccatactcccgttgcccagctatttgggctgactcacgctgaccccccaaccgccacccccacagggctgagccttttccatccaaggcttcacccacagtctcccagtcgcatgtagatccacccttccaaccagcacccgcttctcttctggaagccttcctcgtggttgggatcctcctctttcagcgcctgttggagtaatagcctcctcctcttcctccatctggagttgcttacaacactctatttcactttccatgtgagtcggccttgtttcccaatctttctctatattaaacaggaaactcccagagggctagggactggctggtttaaacaataagcctctgaaatacaggacttcacctgaccctcctgccagccacaagtggcagggcgggagagctttacaaatcaggaaaccaagccttgaagaggttgtggcctgcccaagtctatggccaagtaagattcagagctgggtttgaaacccatgcccaactccactatccagttctttctgctttggctttggctctgatcacccccaaaaaaaccctatgagggccaggcgcagtggctcatgcctataatcccagaactttgggaagctgagggtgatcacttgaggtcaggagttcaagaccagcctggccatcatggtgaaaccccatctctactaaaaatacaaaaattagctgggcgtggtggtgtaatcccagctgctcaggaggctgaggcagaagaatcgcttgaacctgggaggcagaggttgcagtgagccgagattgtgccactgcactccggcctgggcaacagagggagactctgtctcaaacaaacaaacaaaataacaacaacaacaaaaacaacctgtgaggcaggcatttcagggattatgatcctattgcccagataaggaaagcaaggcccaaagatgagcaaagcactcaatatcatccttattctgttcccacttccagctgcacttgggtccaagtccaagtgctgaccttttctctctcatcttctctgggtgatgggcactgcccaggatctcttggctgaatggcacagaactgggtctcgagctctcagaccaaagccctcatcctggactggtcccactgccactctgaacccaggtgcctcctctgaaggtggagactcacctcacctgccttgcagccagctgggtgctcagagacagaaatgcaaagtacctggacacaccctggtcaccatcattctggactttgtccctcttgttaatgctcagctgggaaaggaataccctcaaaggccctttcctcaagaatggaggagagtacctctgagcctggcacaggcccagcccaacacagcccaagccaagctgggaagggtgtggggcaaggaagccagactgacattcctgagacgggtttgccaagccctacactttatgtgttgtacccgggaaactcaatggaggtatggcccaacgctgacctttggcatggaggcctaagccaccctgctggtgcccagggtggccagcaaggggcttcagacaaccctggatggaaaataaaaatagtggctaatatttgttacacgctaactattgtcaggccctgtgccttcccctcctccccaagtgctcagagctgtggagtggatgggttccaccctagccctgttcctctgtcccctctggatcatcttagaccagaaagtgccacagctgagtgtcccgcttcttccgcatcctgccaggaccactccatttgtgggcgatatagccagctccacctcctccgggaagcccttgttcacagtttccaaagcaagccgcaggcgggatggatcctgcttaacaccccggcccagaaccccttggatctccttcttcctccatgtccaagacacccagcttaacaaccctgtagcccccaacttggccctagcggcacctcgcctcgaccttgccattttatactcaattggggcgtagggttctgaagcccagggtagttggtggggaggcagcacgagggtgcaggatgaggtcgggaaaagagacctcgtccgcccaccgcctagcgcttcctcctccctgcaggcgagccggggaatccccggcagcaccgatatccgcagagcccaagaagtgggcctctctgccccgcccccccggctcgccgagggctacgcggcgcgcctgcgcagaagaaggcagcgcccaaggcgcatgcgcagcggtcactcccgctgtatattaaggcgccggcgatcgcggcctgaggctgctcycggacaagggcaacgagcgtttcgtttggacttctcgacttgagtgcccgcctccttcgccgccgcctctgcagtcctcagcgcaggtgagggcccgcgcggtaggtgcggcgccggccgaggaagccccggggtgtcctgccagccgtggcaccgctgccccgggtgctgggaccccatcccccactgtcccagtcacccgccgccttgaggtcagcgtttatcctccagatcttttgcctagacggccgcctcagtttccccctttcggccccttccggctattcccggttgaacccgccgctttagaattcccttctcatacccctcccgtcattctcgagacctcgaccgcgggtcacctctgacccccactgccggaggactgccttctttctccagactcaactccctcgactttataagcccctgcgcgtccccagtgaggcccaaggcgctggccctcatacccctaccctcatttgtgcccctcctttctcagttatgcccagttcttcccgctgtggggacacgaccacggaggaatccttgcttcagggactcgggaccctgctggaccccttcctcgggtttaggggatgtggggaccaggagaaagtcaggatccctaagagtcttccctgcctggatggatgagtggcttcttctccacctagatgtaagccaagatgtcttatctgcactgtgcatctccctaagaaacctctggcctcccaaacctgttcttgacctttccctcatccttccgcccccttgattatgtactgtcagtathcatttggtgaagttgctttgcaggtgcctttgtgtagcgctggagaatgaagaagttggtgacccgggtaaagtgtggtcaccattccttagctcacatcagtgctgtccttaggcatttttgagggagaagtgttagtattccagggtaccctttatataaactgcggttgacacctgaatccagtgagcttgcagtgatatttgcctgattattaacaactgttgatgtcactcttcatcagtctttccacaggagccagcatacttcctgaacatggagagtgttgttcgccgctgcccattcttatcccragtcccccaggcctttctgcagaaagcaggcaaatctctgttgttctatgcccaaaactgccccaagatgatggaagttggggccaagycakcccctcgggcattgtccactgcagcagtacactaccaacagatcaaagaaacccctccggccagtgagagtaagtgtcattgacaatgaaggagcaggtatgggtgtttgtgctcattggtagactagaagcagtccccacagtggtggtgagggtcacactcactcacagagggctgctatgtgcaggctgggctctgagcacagattatctcatatgattgtccccccaagggtaggcacttttagcttttccatctttaaaggtgaaacagtggccagtgttgcacattacaggtttttggattgcacgttagtgtctataggggttttagtgtttcctcagtgcctcgttcacataaatattaaattggaatgttctaatttccctcattaaacatttagccttctaatttccctcattaaacatttggccttcggctttttatttatttaatttttcttttttgagacwgagtcttgctctgtcgcccaggttggagtgcagtgatgcagtctcggcttactgcaacctccacctcccaggttcaagtgattctcctgcctcagccttccaagtatctggaattacaggcatgcaccaccacgcccagataatttttgtacttttagtagggtttcaccttgttggtccggctggtctcaaactcctgacctcaaatgatccacctgcctcagcctcccagagtgctgggattgcaggcgtgagccaccgtgcccggcccctttggctttttaaagtagtgattttttttttcttaaaagtttttgttctgttgtggtaaaatgcccaagraaaattaccattttaagcacttaaaaatgtgcagttcagtggtacattcatattgttgtgtcaccaccaccatccatctccagaacttttttcatcttcccaaactgaaattctatacccatcaaacagtaactctccattcctctctccccaacccctgacaaccaccattctgctttctgtctctatgaatttgactattctaggtacctcatataagtgaaattgtacagtatttattagtgatttttaaaaacaaatttatcttggctgtgtgcagtggctcactcctgtaatcccagcgctttgggaggccgaggtggtttgatcacctgaggccaggagttcgagaccagcctggccacatggtgaaaccccactgttacaaaaaatacaaaattagctggatgtggtggtgtacgcctgtaatcccagctatttgggaggctgaggcatgagaattgcttgaacccgggaggtagaggttgcagtgagctgagatcatgccatgtatctttatttgtatatacatttgttgttgttgtttttaacaaagagactagagttgaatttagtttgctctgcttctgataggagagaacaaagcttttcaggttccacttaatcccagagaatattttacaggtttttcttaggcgtgttctctgggtgtgggcttgtaagaaaataagttttttttttctttaagcagaaaggatttaatcctttgtagggtttattttcaagagttagttacgtcttttttaccaaaatgcttgcaatggctatgttttaaatgataggatttttttctttttctagactttaatgaatatgtattacttttataataaatgaaattaacttcaaaataatttttttggccttccgttatagaagattttaatgaaaactgtattgagacactttacccaagttataggaaaggctagccagtgactcacaggagtgttccagaatgatgaagaaagacttttctagaaagaaggtgaatgaatttgctcaaggggagagggaagtcactgtagctagaaggataattaccagccaacggtgtttagtcagcagactttgatgaatttagatgagaaagtagatgaggtatgtgaatgtgatatacccctattttttcttactttattagcaatctaaagacctaagtcttagtctaatttctgttgtttagatgaaaaccaatagcttttatgttaagcaacagcaagcctctttgtcaagaatctgtttagaaaatgtcagcagagacaggatgtggtggctcatgcctgtaattccagcactttgggaggctgaggcgggaggactgcttgagcctaggagtttgatagaagctagggccacataacaagactccgtctctacaaaaaataaaaaataaaaagaattagctgggcgcagtagaacacctgcagtccaagctacttggagagctaaggtgagaggatcacttgagcctggaggtcaaagctgcagttagctatgattgcaccatgcactctagcctggttgacagagtgagatcctgtttcaaaaaaaaaggaaaggaaaatgttagcagagaaaaaaatgtgtgtgaatatttcccgttaccttacagagtgtgtcctctcataaaataagctgagtgtagttggggtagaaattactggaaatgatccaactcaaggattccgggttgtctaaaactagaaaatggtactttttttggatttatgacgagaaatactgtgggtttaagaggcaactggaatgtgccagttaactcttcatagacgcattgtttcctgtgaagcagatgaaaaactagagagattagcagaacctaataaaaatargcttgtggctgagtgcagtggttcacgcctataatcccagcactttgggaggccaaggcaggtggataacctgaggtcaggagttcaagaccagcctggacaacatggtgaaaccccatctctactaaaaatacacaaattagccaggcatggtggcacacacctgtaaccccagctacttgggaggctgaggcatgagaatcacttgaacccaggaggtggaggttgtagtgagccaagattgtgccactgtactccaacctggggtacagagcaagactccatcttaaaaacaaaacaaaacaaaaaaaacacttgtgtctggatggtggggtacagtaagtattaagtttatctttgaggcaataaaagaaagaaataagtggttttcttacatactgtgcaaccagatctgatgcttcactttttccatttcctccctcagaagacaaaactgctaaggccaaggtccaacagactcctgatggatcccagcagagtccagatggcacacagcttccgtctggacaccccttgcctgccacaagccagggcactgcaagcaaatgccctttcctggcagcacagatgaatcagagaggcagcagtgtcttctgcaaagccagtcttgagcttcaggaggatgtgcaggaaatgaatgccgtgaggaaaggtaagagatgarttgtgaaccattagtggtagtgaaggggtccttttagwtcttttgggccctcagatttgtgtatgagctattattagggcagtatttatggaaacaccttcctcttttagggccagagaggaaggtcttcaagatagacagtcaagggactgtattgcgaaagtgggactttctttctggtgcgtgtgtgggatgtgaccagcttttatagttactacttaatttctgaaaataacctgcagtcttgagctgccaccagctgccttttgtccctttggtctttcccatcatctgctaggataaagatagaaaataatggttttactgcagtaagtgctggtcctagggctcccaagccgtgtgtcttactgatggtcattgaattgcaaccttaactccacaatatataggtgtggctatatctgcagagaactcaaggctccccaaaagcctaaccagcagaaattatgcatatggccaaaattgttttctatgaagaaaattgagattaggaccaggcccagtggctcacacctataatcccagcactttgggaggccgaggcaggtggatcacttgaggccaggagtttaagaccagccaggccaacatggggaaaccccatccctaccaaaaatacaaagattagctgggcatgatggcgcatgcctatagtcccatcttctcaggaggttgaggagggaggatcgcttgaacccaggaggcagaggttgcaatgagtcgagatcgtgccactgctctccagcctgggtgacagaatgggactctgtctcaaaaaaaaaaaaacagaaaattgagattaggattggggtggggatgtagtggagtgaataagacatgccaaccagcaagaaagctttggactttattgttcattaaagctggccagtagctctgaaaacaacaccaagagtctgccattacagtaactaaaatagaagagatgctttgtacactcagttataactaactttggttatgcttggccttttttgtgaactaggccataagccatttttgacaatatgtttggaagataytgtgaactcagaatagaaagttggtcccatttgtttcttgttacttttgttccagaggttgctgaaacctcagcaggccccagtgtggttagtgtgaaaaccgatggaggggatcccagtggactgctgaagaacttccaggacatyatgcaaaagcaaagaccagaaagagtgtctcatcttcttcaagataacttgccaaaatgtaagtctcattgtyatttgcctgatgtagaaaagaatttataattcaaatgtacattagattaaatataaaattgcatggtgaggctgggcacagtagctcatacctgtaatcccagcactttgggaggctgaagcgggagaagatcacttgaggccaggagtttgaggccagccttggcaacatagcaagacactatctctaccaaaacagtttttttaattagccaggcatgatggcttgcatctatagtcccagctactcwggaggctaaggtaggaagattgcttaagcccaagacttcaaggttcagtgagctatgatcacgctattgcactccagcctgaatgacagacagagactcagtttctaggaaaaacaaaaaaatgtatggtgagttgaggcttgaaagccatatcccttgcttgcgtgagcaggtgcttttggttgtggtgactacaggtgctgttggtagcctgccttctgtcctttaatacttaccgtctacacatggcactgagccaaacacgacatacagtcttatttacttacaagatgaggacatcaaataacctgcccaggatctccctcagttgccaagctgagacttgttgtatttcaccaaaaygcagctgtgtttcacaaccaycattctgtactgtcttttgttcaatttttagctgtttccacttttcagtatgatcgtttctttgagaaaaaaattgatgagaaaaagaatgaccacacctatcgagtttttaaaactgtgaaccggcgagcacacatcttccccatggcagatgactattcagactccctcatcaccaaaaagcaagtgtcagtctggtgcagtaatgactacctaggaatgagtcgccacccacgggtgtgtggggcagttatgtaagtagcccttggctttcaaatattactgttgttatttggcaagccaatgatgatgtataggggttggatcttttatggagggaacattcagtagctgaaagtgtgccatagcaaaatactattcttagcttctgaaaaatatctacagattacttttaaaggaactctaatatgcaggtagctgctggagccccttaacttgtgagggttcaagcttataggctcaatgaccacacacgtcagtccactttctatcactctgcaagtgagtgtgcctttaacaccaggmagtctttcacagagacatccttggttgtggctgtgagtggagaaatacgaatctagcagcgctagagaaaaagctactccaaaagacatgttaaaaaggatggtagatcccatcactcgtccttcaggaggctcaccatcctagggatgctggagagagttgctggccagattctccaaaggcttgctaaagagggtcccggtttgaggtttaatgatagtgatatatccaaacattacatgactggcttgcagagggtaaccaccatccaggatgtccctctagagtttgctttttcttaagctaacatgttattggaaagaataatgtttctcagaaaataaaccttagtttcttagaaaagaaactcagctaataccaagcacttactgactgttaaatgaacacttgttcttgatgattcctggaggtatcatcaccctagcattgacaccttctcccacctagtctgaagatgaaatcagttgaaatttctgaccccaggtttcacagtgagagagttgctacatcaacatgtttcagtctcctggatcctagaaaggggaaaaaattcacatggtgttgagaaccatgagctttattttctggttttgtttgtatttttaaacagggacactttgaaacaacatggtgctggggcaggtggtactagaaatatttctggaactagtaaattccatgtggacttagagcgggagctggcagacctccatgggaaagatgccgcactcttgttttcctcgtgctttgtggccaatgactcaaccctcttcaccctggctaagatgatgccaggtaaggaagcctggcatgagtgccttcgagttttttgggtttcttagtaataacaagaatattggcaacaaagaagccttaccagaacctctcaattgaaaatcataatcctatctgggcatttgttctggggtcaagcatgaaatgctgactgtacattatgggttccaggagaacgtgataccagtgaaaattcaaacttgaaacgtctcatccttgagctaattgcctcaaatatgttttgtattctaagatgatcctttggagaagtctcttaatcatttagttagctcttgattgagtttggagtgaggcagtcagatttaagagcagattaatggcctgccacaaggttattctacacctttgggccttctcacaagggaagcactaactagttattttgccaggaagaaactggcacacagtgtctttttcctactaggcattttcaaagcatcatttccaaggaaaagtctgttgtctttctctaggaaataatttgtcttcgatgcacatggcaataaatagcatttttgttgtcttaggctgtgagatttactctgattctgggaaccatgcctccatgatccaagggattcgaaacagccgagtgccaaagtacatcttccgccacaatgatgtcagccacctcagagaactgctgcaaagatctgacccctcagtccccaagattgtggcatttgaaactgtccattcaatggatggtaagtgtggatagaggttcctctgaaacctaagatgaaaaactatgcctgaactctttaaaagtatggtgttttgttgtgttttttaattttttttttttgtgaccgatcctcgctctgttgcccaggcaggagtgcagtggtgcgatctcgactcactgcaagctccgcctcccgggttcacgtcattctcctgcctcagcctcccgagtagctgggactacagacacctgccaccacgcctggctaattttttttttttttttttttgagacggagtctccctctgtcacccaggctggagtgcagtggcgtgatctcggctcactgcaagctccacttcctgggttcacgccattctcctgcctcagcctcctgagtagctgggactacaggygcctgccaccacgcccagctaattttttgtatttttagtagagacagggtttcaccatgttagcyaggatggtctcgatctactgaccttgtgatctgcccgcctcagcctcccaaagagctggaattacaggtgtgagccaccgcacctggcctaactttttgtatttttagtagacggggtttcactgtgttagtcaggatggtctcaatctcctgaccttgtgatccgcccaccttggcgtcccaaagtgctgggattacaggcgtgagccaccgcgcctggcctgttgtgttttttaattttcttttcctttctgccaggatttttttttttcttcttccaacttttaggttcagtgggtacatgtgcgggtttattatatgggtaaattatgtgtcacagggtgttggtgtaccaattatttcatcacctaggtagtaagcatagtacccaatggtagtttttgatctcaccctcctcccaccctccaccctcaagtcggtccctggtgtctgttgttcccttctttgtgtccatgtgttctcagtgtttagctcccacttataagtgagagcgatatttggtttttccgttcctgtattaattcacttaggatggcctctagctccatccgtattgctgtaaaggacatggtctcattctttttttattgctgtgtagtattgcattctgccaagatttgtaattggtggacttttttctaatagatttgggtgaaagtggattttctattctggcttttactaggctctgggaccccaggtaacctagaaattagaggaagttcattttctttccaatattgaaaatgataccttagaatagaagtttacgttgttctgactctaaccaaaacagaaatttctgaagcggcaaaagctcttcagagcagtctctggtctttcctcaggggcrgtgtgcccactggaagagctgtgtgatgtggcccatgagtttggagcaatcaccttcgtggatgaggtccacgcagtggggctttatggggctcgaggyggagggattggggatcgggatggagtcatgccaaaaatggacatcatttctggaacacttggtatgtatacattgtattacatacactaaaattccattatcctaacaaggccaaggactaactagtctaactgggatcaggtgaggagacagcctgacagcatatgaagcctgggccactctttcttttggcccagcttagtggaatcccttgggtcatggaggcatggctcttagaatcaaagtaaatcccacagcctaacacactgatagaccatttattgctatctgagctcatttcagacatagttgtgggtctagccccatgccatggcaagagcctgtactctctgtgcctcaggctgttcttaattaaaaagaaaaaggaattctagtacttttctcctggagcacttgttaggttcaggtgttgtgaagtgctgaactccgtgcctgccacgtgggaacattctaattcatcctggttttcctctgctcttcctcatacagaggctatgtctcgtggtagatgggagctagactttggagccctgccacctcactagttgtgtgaccttgagttggtagttaacctttctatacctcagtttcatcatcaatataatggagaaaacaataggacctaaatcaaaatatatgtggagaaggtaaataagttgtatgcaaacagttattataracattccctctgagaacctatgagaaccctaaagagacgaaaattacataaatttgaagaatttttgtaattttgaagaatttttttaagccttcagaagtgggtaaggcagttggaaacccatctagcagttagctaaaatgccagtttatagcctatgcttggtaaaggaagggcaggctttttaaaaagcgtccttcagcactgtcaaggggtatgagaacctagtgcagacccagaaagcctgggagttctaagggtggaaccactaccaggagaaaaacacctgatcatgtgtcttaattcaagaagctcttttcttttttttcttttttttccgagatggagtgtcactctgttgcccaggctggagtgcagtggcgcgatctcagctcactgcaagctccacctcccaggttcatgccattctactgcctcagcctcccaagtagctgggactacaggcacccgccaccatgcctggctaattttttgtatttgtagtagagacggggtttcaccgtgttagccagaatgttctcaatctcctgaccacgtgatctgcccgcctcagcctcccaaagtgctgggattacaggcgtgagccaccacacccggccagaagctcttttcttttaaggatgtctcctgatgtgggctctttgaaggtatggtcattgtgagatggaaaaggctggagagagaaactttataccataggagattgaaccaacccagctttgcatgtggttttagcaaaaacattaattatagaatgttatgttaagatctatgaagactcttctggagttctttttgttttttgagacaggctctcactctgtgcccaggtgtgatcacagctcatctgcagcctccacctcctgggctcaagtgatcctcccacctcaacctcctgaataactgagactacaggtgtgcgctagcatgcctggctaatttttgtatttttagtagaaacggggtttcaccatgttggccaggctggtctctaactcctgagctcaagtgatttgcccccctcggcctcccaaagttctgggactataggtgtgagccactgcacctggcctcttctggagtttttaatcctgaaacttgagatgtagatcacacaaaaggactcaatgagaattgaaaaccaagtctggccctaaatcaatcctaatgcattaattgtcaagagttttgttcttaagtaggaaataacaccagtcataccaaaacagttaatgccttagctgggtaaaattccagcctctgggataatgttccctgtgggaggatggtacaagcactgcagagccagtcttgttccaaagagcacatgcagtgcagacatggggagtggagctgtgctggctgtcagagcagcaagcctgggtgagaaagggaaaggagaataagatggtgggaagggaggcagcagcagggtatttgggcacactgggaccagtcactgaggtgtcaggtctgattggaagacctgcattttgatcctggttagacaccagcttggccatatgactttgggcaagacccttttgtaactttccttagcttttttacccttttaaaagtgagtagccaggcacgatagctcacacctgaatcccagcactttgggaggctgagacaggaggatcacttgaacccaggagtttgagaccagccctgggcaacgaagcatggcctcctctctacacaaaataaaaatttaaaaaatcagccaggcatggtggtgtacacctgtcctagctacttgggaggctgaggcggaaggaatacttgagcccaggaggttgaggctgcagagagctatgatcatgccactgcactccagcctgggtgacagagcaagaccctgtctctaaaaaaaaaaggaagattagatatccttttatagtcatgcattgcttaacgatgggggatgtgttctgagaattgcatcactaggcgatttcatcattgtgcaaacaccatagagtgtacttacataaacctagattatatagcctaccgcacacctaggctttgtggtatggcgtgttgctcctaggctgcaaacctgtacaacatgttactgtattggatactgttggcaacaccatggtatttgtgtatctaaacatacctaaacatagaaaaggtacagtaaaaatacagtattataatcttatgggaccaccatcatatatgtggtcgtcattgactgagacatcattaatgtggtgcatgactactccaatcagtccaggaacaaattaaaaagataaggagaaaagtcagtgctttgaggctccacaacaccttgctgtgtccatttagagcaatttacagctgttgctgtaattaatgaagctatctcctcccaggcaaagcctttggttgtgttggagggtacatcgccagcacgagttctctgattgacaccgtacggtcctatgctgctggcttcatcttcaccacctctctgccacccatgctgctggctggagccctggagtctgtgcggatcctgaagagcgctgagggacgggtgcttcgccgccagcaccagcgcaacgtcaaactcatgagacagatgctaatggatgccggcctccctgttgtccactgccccagccacatcatccctgtgcgggtaatggcctgtctctgattggacttgccgtggggtgtgcctctacacatgatgtacggatgttctgcttcataccttcctgaagttgggcttgagcggggtgactgccagggcaggggttgtagccagccaccctctgtcatgtttccgccattggctgacttcaccaagagaagaaagcctttgaacccagcaggctggggcagaagttccctctccggagcactgaccttaacagggtaaacacagagcttgtatctagaaagctccagaagcctgagcttggccagctttgaagtatggctttctacttagtaaatttcaaaataggttttgcccttcccactacaaatggtagcactgttgatgtcacagttgaattagtgtaatgaatacagctagtataactgaatctagattatacatcgtgggtatgagagtctgctggtacgaacagaaccagtgttttctgattaaaaatgtatttctttttaataaggttttggttccstggtgttcacgaaacaacactggcttcttttaaatgacaggtgtttgggcagcgctttccctctgccccaagcttgcatgtgttgctacagtctggtcttgagcctgagcgttgtggggactgcgttcgttaggatctctgctaagaggtagtccttcctgttgtgaccttaccttctgctctcattgaacttaggttgcagatgctgctaaaaacacagaagtctgtgatgaactaatgagcagacataacatctacgtgcaagcaatcaattaccctacggtgccccggggagaagagctcctacggattgcccccacccctcaccacacaccccagatgatgaactacttccttggtgagtacctggggagctgctggtgcctcactgaggagttgcataaagctgtctttgcagtgtttataattgaagcccttcagaggcattcagatttgtttcttcttctttttttagttttttttttgagacaagagtttcgctcttgttgcccaggctggagtacaatggcacaatctcggctcaccgcaacccctgcctcccaggttcaagcgattctcctgcctcagcttcctgagtagctgggattacagccatgcgccaccacgcctggctgattttgtatttttagtagagatggggtttctccatgttggtcaggctggtctcgaactcccgacctcaggtgatccacccacctcagccttccaaagtgctgggattacaggtgtgagccctggtgcccggcctgtttcttctttttccaagtaactaagcatgccctcaaatggttcaaaaccctaaaaggtatttattgtctgattcacatcaagagggtggagagtcattttgggagctctgagggagcctgggaatccgctcagtgtttccagtgcccccttgtctacgtggctgaaggatgcacagtaatgacttgcagggagaagaggcctctgaaggcttgagtccccgctgtccctccggagtccacctcacatttgtcttcaccactrccctctactccatgatgttgtataatccttgaataaccccacacctaatcgcctctgataagaggaattgctcaatattttcaactgccccrtggttctatactgctccacccatgtccaacctaaaggcagagatggaagggggctattagccacaggtcacctctgcctcgaaggtacattgccttcccaagcccgcccagygtggctcagcttcctcacaggctctctgttctgttggaaatgctgggtttaaactgtcacgtggcagtgttggagcagcttcttccctacaggcctgtgaaatcaagcccaactctgggttttatttttctctttatttatttttataaaagccttaaaatttttataaaagccttatctcagtagagatatagctcacttaccataaaattcacccttttaaagtatccaagtctatgatttttaagtacactcccagtgttatgcaaccatcacttctatctgattctagaacattttcatcacctcagaagcccctacccattaggagtcactcctcttttccccatccccagcccctgtcaaccacggctctttctgtctctatggatttgccttttctggaccttgtgtctaagtggaatcataccgcctgtgctcctttgtgtctgccttcttccagcatcatgtctgcaaggctcatccatgctgtagcattcatcagcacttcatttctttctgttaccaaataaccttccattgtacagatttaccacattttgtttatccgtctattggtggacatttggttgtttctcttgttaactattatgaataatgctgctatgaacatttgtgtacaagtttttgtgtggacatatgttttcatttctcttgtgtatattactccctttaatatttaaaaactgtttctcctcagagaatctgctagtcacatggaagcaagtggggctggaactgaagcctcattcctcagctgagtgcaacttctgcaggaggccactgcattttgaagtgatgagtgaaagagagaagtcctatttctcaggcttgagcaagttggtatctgctcaggcctgagcatgacctcaattatttcacttaaccccaggccattatcatatccagatggtcttcagagttgtctttatatgtgaattaagttatattaaattttaatctatagkaaaaacatagtcctggaaataaattcttgcttaaatggtggttctttctgctattggctactggataacattcttcattggctagacacagtggctaacacctgtaatcacaacacttgggaggccaaagcaagaggatcactttaggccaggagtttgaagctgcagtgagccatgattgctccactgcactccggcctgggtgacagagcaagactgcctctgaaataaaaaataataattgtcatcatccctttaagttcagtctgtattctaggaatgaataaactgaatgaagtactggagctctggtaatggcttcagaggaggagcagcagaacctcccactgcttgagccctgctacctccttaatgcctactgtatccagtggctgacccagccgcacccggcaactgaacagttttgaaagagtgacaccaccttggcggccggtttcactttaaacttctcacttcacatcttcaatggacagtcagtgctgcccagcagtcctgctacagctgcctccccctgactttccctttcagctactgccttgaccccattcttccctgtgaaagtctgggcgtcagaagactggcttgtctgtcaccaccctgtcctccagcctgtcagcttcctgcacctgtagttgtgtcccatccagcaaaggcagaggggtttgtgctcctcatcctgcctctctccgtttgtatttcaggtcctgttgtttcttgcatggtcctgcagccatctctttgctgcagaatttctccccctctgctggttcattctccttggcctgcagaggctttgtcccccttctgaaaaataagctctctctgtccagacccccttcttgctgcccctgcccctctgtgctgcccctgttctaagcagttgccctttcatccctgttctctaggaaggctgctcgtctctcacatctgtctctatcttgccaagtccggtggccagttctgtcttcctttggtggatctcagtggtatttgcagtggttgtccttggcctttttgaagcttctcctctaagcgtctgtgccactaacctctgccgattgttctccccctgccccatgagctggttcttgttccatttgggtgggtcttgctgtgaatgttgacggccccaccaggctcgtctcttaactgtactcaactcccccaccccacagaatctctcgcagcctgggctttgagctgcatctgtgcactgccatctctgcctgggtgtcaaacaggtacctccaaccacacaggcacggagggcacccagggtctgctgcccctcgctgcctggtcttcttcttgccttctcatctgcccaggcacccagacctctcctgtggaaatcagccctttccctcacatgcacactactagcaagtcctgtaagttccacctctgaagtgcatctcaggcccggccacatctcatcccctcctctgccgccaccctcatcatgccaccatatggcatctgcccaactcaccccaagagcagccttcctagagaagatcttttaaaaataaaatcagatcatgtccctaccctgcagaaaactttcctgggtcttccagtcacaatccggttaaattctaaattcaggctgggcatggtgggcatggtggctgatgcctgtaatcccagcctgtaattccagcactttgggaggctgaggtgggagaattgtttcagcccaggagtttgtgagagcagcctgggcaacaatgggaaatcctctctctacaaataatttaaaaattagccaggtgtggtggtgcacacctgtagtccagctgctcgggggaggctgaggtgggaggatcgtttgagcccaggcaatcgaggctgcagtgagctgagactgcatcactgcactccagcctgggagacggagcgagaccctgactcaaaaaccctaggccaggcatggtggctcacacctgtaagtaatcccagcactttgggaaggcaaggcaggtagatcacttgaggtcaggagttcgagaccagcctggccaagatggtgaaaccccatctctactaaaaatacaaaaaattagccaggcgtagtggcatgcacctgtaatcccagctactcgggaggctaggcaggagaatcacttgagcccaggaggtggaggttgcagtgagccgagatcatgccactgcactccagcctgggtgacagagtgagattccatctcaaaacaaaacaaaaccctaagctcctcacacaggctgacaaagttgggatcaaggtcccatccagttctccagacccgtctcccatcctaccctcgtttgttcactgtgggcctcaaatacctaggttctctgcaacttccaggccctggtgtgagccattctttctctgccagtatgcttctcccctggatcatggtgtggctgcctctcttcactcagacaagggtccccaaggagaccatgctgagcatgccggctaaggcagaccgtcttgcagtctcaccattgcttggcctctgacatgatgcccttcagagctctggtcaccacccacaatgacttttcccctgctggccatttgccctgttgtaatgtcatctccctgaggacaggtgccctgtattctcacttccgtgtccttaaagtccagcacagtgcctaatacatagtggatgctaaacaaatgtgtactgaatgaaagaaaaagaaacccaatggcaacaggtcaagtttactagaaagactgagacagctgaagcaaaaccaagcagctggagttgagcagagtcctttgacctcgcctcccttctcgtagctctagaaacggcagctgtgttttctcctctctgtacagagttgggctggcaccccttcccaggaagctggcagtgggcctggggcacacaccctcagagctcggctgagtcacactcccatcagataaaaccatacacctaggcaggctacagggcttgatggaaaccacatcacctcggaatcatgattcagttccttcctgctcaggaaacgagcctcgcttagcattcctggctctgctgcctcacaggagctttcagggctttccattgtccctgtcattcccacgcccaggactccatcacctcccttccttcaaatgggattgttctcctccagctggggtaatgttgctacctgaatgcttaggaagatccactcttccttcgtaagacccagagccagcagaagcaaggccctcaggtgcatgtgcccctccctgcttcttggggttatgagaacgaaggaccgggtgatctgcaggaagtaggcgggattcgtgaactgcttaaaaatggaagtttgggccgggctccatggctcacgcctgtaatcccaacactctgggaggccaaagcaggtggatcacttgaggtcaggtgtccgagaccagcctggccaacatgatgagaccccatctctactaaaaatacaataaattagccaggcgtgatggtgcgcacttgtaatcccagctacttgggaggctgaggcaggagaatcgcttgaacccgggaagcggaggttgcagtgaaccaagatcacaccactacactccagcctgggtaacagagcgagagtccgtcttacaaaaaaaaaaaaaaagaaagaaaagaaaggaagtttggcttttataagcaactctagtgtgaaactacgatgtcatgaaagttctctaaggatatttagaagctgacggcattaaataaggtgtcctaaagggaaaagggcaaactgtatttgaaatcttagtgaacagacattcctctccttgaagttttcctctatcaggttgcctgagtctcatgcctgctcctctacttccttgtgctgggaagcactctctgctccccaacacgaggggataacaccaggtccatggactttcccaggagccctggtcctgctcccagagacagctactgtcccagctgcatgtgcctctgatgcaaccacatctgaaccctgtcagtgccctgggaggcactgggtggagagagaaacactgaagccacatcagttgagggtcctgcgtgtaaatcccatcacctaataataactgaggccctgctcagtgtttcagacccttacccatagtgtacgaatccctccaacgtcctgcagagtggcgctgctcattcccatttatagagcgagcaagctgaggctccagtaggggaggtcacctgcctgagacaatccaaatggcagaactggcaggcaagcccaggcaatctggcctgagtcctgtctctttcctggccgtgctgatgggcaaggatggccgccgtgtggaggagagaacctggagccatctctgagtacccttcctgactacaatgcagagggcgccgcctcccacccagccccaccctggcccagctccaaccacttcctgcaggacctgagatagtggtgcgcggcttctctgatcacgtagacagcacagagccaagtgccacagacccccagactcacctgagccgagcccaacagccccctaccatggcccgtgtgcttcctctccaaatgctctcctgaatctccagccccaaaagcatcagggctgtgagcgtgggtggggggtggggagatggaaggtccaccaggaactgccggagggtgggcctggcaatcccaagacaggcaggtttgccttgcctcccacatgcaaaatatggttccctgaatgggattctgtttccagcttcctgtccctgcccctgattgtggccagaatagtctcagagccactcaacagtggacttccctagactccagccagggggaaaagactattgttttcttttctctgcaggcagccaaggaaggatgacaggttgggtcagagcccacgtggggcacagggcttccgattggtaggtcagagaccctccttctttcagatgagcagataacagggatctacagcccaccacaggagcccctgtacccaagtcagaaagaggacggcagcatagacttcccccacagccatgccctggggagtagggcaaaagcaaccctccaagggctgccatgatgagcccaccaagttagctgtctgctgccagctctagctctcccctccagaggccctgagtggacaagcagatctcaaactggcctggaccggccaaaccgggccccagctccaacctgtcagcctgcatatttctcccctgctcctcaaagggcagttttggctgtggtaatggtgtaggctgccagcccaagagagggcccctcaggggctccaggcctgacgctcctcatggctccacacacagtgtggaggagatcctgctgaggacagaccctgacctctccaaacactggtcattggggctcccagctctatcctgaaatgtacactatcacatatagaagccgggtgcagtggctcacacctgtaatcccagcactttgggaggccgaggcaggaggattgcttgagcccaggagcttaagaccagcctgggcaacgtggtgaaacctggtctctactaaaaatataaaatttagctgggtgtggcctgtagtctcagctacatgggagggtgagatggagcacctggtcccagaaggttgaggctgcagtgagctgtgatcccaccattgcattgcactccagcctgggtgacagagcaagactgtggcaaaaaaaaaaaaaaaaaaaaaggtcaggcttggtggctcacgcctataatcccagcattttgtggggctgaggcgggaggatcacttgcatccaagagtctgagaccagcctaggcaacatagtgagatcctgtttctacaaaaaaataaaaaattcgctgagtatggtggtgcacccctgtggtcctaactactcaggaggctgaggtgggaggatcgcttgagcccaggaggtcaaggctgcagtgttcatgccactgcactccagcctgggtgacagagtgagaccttgtctcagaaagaaagaagagagagagagagagagagagagagagaaaggaaggaaggagggagggagggaggaaggagggagggacggagggagggagggagagagggaaggagggagggagggagggaggtggcttgcctaggtgtccctttaatatcagaatggagagacccagcaagcacctgtaggtggaaagagaaaggagtggattctcctgtctgtggctcccagctccctgctgcagggatg

SEQ ID NO: 96126 - DNA, 18126 bp, Homo sapiens
  misc_feature (1)...(18126): n = A,T,C or G
tgcagcccctcactcctcagcattttcctctattacaagacattctctgtgagcctcttcataacagctgggttagaccttagttataatgcgattgtaaaacgcgttctgattttagcagtattaaatgcagtgagattaaaagaaccatttccaaacatgcccttaagtgggaggtccctttgcgcgcagtctttctcctttgatagccctcatcactttttccacctgcaaggctccagttcatccatcatctcccagctccacgggttcctccttggcaaaccgagtgtggcctggtagttagaagcccattcctaggttcaaaccccaattcccccacttgctacttggcactttgggcaagagaatgtacctctctgagcctccatttcctcacctataagagacctataatcacgtctgctccccagcattcttggtggaaaagaaccttgtatgtgaagtgccacactcagggcctgctgtcataagcgcttgatgaacggaagtggtttcagctgatgccatgatggtggcggtcactgagcatgctgtgtgccagagaacacctcagatgcacctcctcacactgtgaggtatctgagcgcttgccctggcatgtggagtagttgagtgtgaactcccagaactttgcccagagcaagggaaagggcaagggctggagctcttcctctgctggggactctgggtggggttttgggatgggatccagggtccttgtagggactcagttccagcctcttttccctctcctctccctctccagactgtggtacagacctccatgagccggtcccaggtagccctgctgggcctgagtctgctgctcatgctcctactgtatgtggggctgccaggcccccctgagcagacttcctgcctctggggagaccccaatgtcacagtcctggctggtctcacccctggcaactcgcccatcttttaccgcgaggtgctcccactcaaccaggcacacaggtaggtgctgctccaagggtctagtggagggactaggctcaaggggagtccctgtgtgggacccccattatactcagggtgctcaggtcctgggagggcaatgggagaagcctaggaataaagaaaggtgggctacaccaggttcccagcaaacacattcccctgtgtgcctgcagggtggaggtggtgctgcttcatggaaaggcctttaactctcacacgtgggagcagctgggcacactgcagctactgtcacagaggggctaccgggccgtggcccttgaccttccaggtgagcacccccacccctttgtctagggaagccttaagtgtggctgggaggcaactggaccctagggtctggacaggccgtggcaggtcacaacataaggtggcaccatgaaaaagtctgtgttttcattttctactatgaaaactacagtgtgaattctaggtcatggagcaaataaaaactcttcacaagcagtatactttctttttttttattttatttatatatattttttgaaacagagtctcgctctgtcacccaggctagagtacaatggcacaatctcggctcactgcaacctccgcctcccgggttcaagcaattctcctgcctccgcttccccagtagctgagattacaggtgactgccaccacgcctggctaatttttgtatttttagtggagatagggtttcaccatgctggccaggctggtcctgaactcccgacctcaggtgattcgcctgcctcggcctccccaagtgctgggattacaggtgtgagccactgcgcccggccaagcagtgtactttctatggcaaaccatataggttttgtgtttttaagtacacaaatgatttatgctatcattcttgtcattaaaaaaatgaaaaaatgtcgagtcatagaggattaaaaaatactaaaaaatagcaaagctctgagagactggtgccgcatttctctccctctctaagaagtttaggggatgccacacgctgttctgggtattcccacatgtaaagatgcagacgatgtagaggattgtctagtgggggctgtaaacatgattggtatcctgtctgcttagcacatccatctgtagcttggttttctccccctacatcatgtctcaaggatcatgccggtccctacaaacctccctctttgttgtcaaccctgcagtgtgtcccataggagggatggacaggctttattcagccattcctctactggcggagtgctcaagcaatatagtagctaaagcatccttgggcatgcttctttgagcatgtgagcaataatttctctagggtagctactgaggacaattgatgggccaaaggatgtgttgtgttttgttttttttttgtttgtttctttttttgttttttgttttttttttttttgagacagagcctcgctctgtcaccctggctggagtgcagtggctcgtactcggctcactgcaacctccgccttctgggttcaagcgattctcctgcctcagtctcctgagtagctgggattacaggtgcgccccaccatgcctggctaatttttgtatttttagtagagacagggtttcaccatgttggtcaggctggtctcaaactcctgacctcatgatccgccacctcggcctcccaaagtgctgggattacaggcatgagccaccgcgcccagctgccaggacatgcatttttaaatttagataactactatctcaccctccaaaaacactatatggatttatcttcccatctgtcatgtatgaaagtgcccatttccccatgtctcccccaacactgggtattatttattttttattttattttattttttttttagacagagtctcgcagtcgcccaggctagagtgcagtggcatgatctcggctcactgcaggctccgccccccggggttcatgccattctcctgcctcagcctcctgcgtagctgggactacaggtgcccgccacctcgcctggctaattttttgtatttttagtagagacggagtttcaccgtgttagccaggatggtctcgatctcctaacctcgtgatctgcccgcctcggcctcccaaagtgctgggattacaggcgtgagccaccactctcggccaagatatgcttttctaacaggcatattacattaccagaaaatagcttctgggcagttttaggtagtgtgtgccagtgccagtggtccccaactttttcccccactgtggtgggcaggaagtcctgtgccccttcccagtgcccctcagctggtacctgctgctgttcctaggttttgggaactcggcaccttcaaaggaggcaagcacagaggcagggcgggcagcgctgctggagcgggcgctgcgggacctggaggtacagaatgccgtgttggtgagcccctcgctgagtggccactatgccctgcccttcctgatgcgaggccaccaccagctacatggatttgtgcccatcgcacccacctccacccagaactacacccaggagcaattctgggctgtgaaggtactgggagaaggatctcaaaggtcctggcaccctgtctgtggcttgggggggttcaggactcaagtcttacttggagggacatggccttatccctgaccttggatggaagagttggatggtgttggggaaggcttcctaggaagtggcttgggggtcagaaactcatcaggccccaagatcacagccccctgccttgccctgcagactccaacccttatcctgtatggagagctggaccacatcctggctcgagagtcactgcggcagctccgccacctgcccaaccactctgtggtgaagctacgcaatgcaggccatgcctgttacctccacaagccgcaagacttccaccttgtcctgcttgccttccttgaccatctaccttgaactaacccactcccagctcccagcctggcatgagcttggacagtctggaccgccaccctccctgaaccagggagacagcctctgggattggaggccagaggccagggtcagacccagccaggactcctcatttcatctcacagacacaataaaaaagcatatttgtcctgcctgggaagtgacaggttccgtttcctggtgtgctgtgggaaagacgggagtgggaggcaagtctgggactactttgggcctgggagctggaggggatgtccagcagtctgagaaggctaagaatgcgccacttcctaagtgcctggcctcaccactctgtgcctgagtttccttatctgtaaaacgggtatgatggcaacacctaggttggagggtggttataggactgaatgagtctggataactgagtacttggccacataaggctggggaattgctggtgggaggcggggtgtattactgctgctgcatgaccacagggattggtgggaaatccagggtctggacagccaagccaaggaagtcaggaacctagagggtatggggaacgcgatttaacaattagccagcattggccgggcgcagtggctcacacctgtaatcccagcactttgggaggccgaggcaggcggatcacgaggtcaggagatcgagaccatcctgactaacacggtgaaaacccgtctctactaaaaatacaaaaaattagccgagcgtggtggcgggtgactttagtcccagctactcagtaggctgaggcaggagaatggtgtgaacccgggaggcggagcttgcagtgagccaagaccgagatcacaccactgcactccaccctgggtgacaaagcgagtgagactccgtctcaaaaaaaaaaaaaaaaaaaaaaaaaaaaaaaaaaaaaaaaaaaaccagcattagctgggcactgtggctcacatctgtaatcccagcaccttgggaggccaaggcgggtggatcacctgaggtcaggagttcaagaccaccctggccaacatgacaaaccctgtctctactaaaaatacaaaaattagcccagcgtggtggcacgcacctgtaatcccagctactctggaggctgaggcaggagaatcacttgaacccaggaggcggagttttcagcgagccgagaaggagccactgcactccagcctgggcagcagagtgagactccatctcaaaaaaataaatagctaaataattagccagcattgttatgagttaaagtctatttgcccgcatgaataaataggtaaataattagccagcattgttgtgagttaaaatctatttgcccgcatgacagagtgagactctgtatcaaaaaaataactaaataaagaattatccagcattgttatgagttaaagtccatttgcccccatgttatgtgtgagcagccaagacttaaacctcaggaaaggtgggacagaacccttcccacagcgtgcctccttggcctagagattgaagtctttgtccctcacccttccccaagctgactcagcccctggagcagagggcagacctggctgggagtacaaagggcagctggggcacaagtgggcaactgcagctgtggcctgcagggggccagtggtacacctgtgcctgtttagcctccccctctggtggctgcagaagagccagtttcctcacactgtccatccagggtcacaattacatccattcacagtgacttcatcacacccacccaccatctcacactgtcacatacacaatcatatccactgatagactgcacacgcagtggcacgcttaaaccgtcacacgtgctcttgtccatgcattcattcccattctaggcactgtccgggctcggcacggccccgggcagaaccttgcaggaagtggagctcacagcctcctggagttcagtgtgggcagacagacattggccaataacttcagtacaagtggagctgaggcgtcagggaggacctccccgaggggctgaggcctgcagtggggagccgttggagacttgccgaggagggcgagggcgcaggcccagggctttgcagctctgcatcttgagagcctcggggcggccccctttcctcccgccctatccgggggctgaaggaggaggcgcccttaggggacgggaccgtcctgagctcccggcgcatacctgggggcaggagtggcaggcgtgtcgtgtggggcggggcgagcctgtcagagcagggccagcccggagctcgcaactcgcggggcggcgctggccgcggcggccgctgcccggggacgggatccggatctaatcctccagtaatctcgctgaggcccgaaccagaggcgggcggggacatccgcgccgacgcggccgctggcgccgggacggccctcactgacggtcttcggtctccgccccgacatccggcctcggccacgtggtgggcggaccggggcggtcctgagcctgcgacctcgcaggcgacctcgctggaccctaagtccaggccacagtcagggaagggcgctgagaggcgagcgtgagcccagcgacaggagagtgaggtgggggccctggggagggatagagggactggggctccgtggcttgaaagccgggcaactgggaggcgttggggtttttcttgtttgttttttgtttttgtttttgcctttttttttttttaggagggcggggggagtacaagtctgggttcaaaccttgctcagctactctatgagctgtccttgaacctctctgagcctctcagctttctcctctgtaaagtgggcattctgagcacaaacttcatggggctcttttggggattaaataaggaaatgtgctggaagcagacagcccagcgcctgaaacagaatgggtgctccttaatgggggctccgaaacacggtatcctacccctgtgggaagtccgggagccgccgtggggacaggctgtgtgcaggagctcaccatttccagggtcttggaggggtagttagccattcactttgcccccagctcaccacgcgcagcgccatgaccagcaagggtcccgaggaggagcacccatcggtgacgctcttccgccagtacctgcgtatccgsactgtccagcccaagcctgactatggtgagaagacggtggttccagagcctgtgacggggcctaagggayggggactgtgctctaaaccagcctccaacccctgtcacccagctgagccccactctgctgtcccaaatggctccccaacccctccagccattccccaagtaaatagactgaggcagnccctccaggttagggaggaaccctttccccagagactctgctgctgaccaaggttactcctggcagctggttaaagaaaaacttcacctcactctccagggcaggagtggtgggggaagcctgaggcagccacagggaaaggagaggccctccagaagcccactggggctggacaaaggccacagcccttagggagtcaagcttggtggctagggcctgggaggtggctcctgcctgttatcccagcacttcaggaggttgaggctggcagattgcttgggcccaggagttcaagactagcttgagcaacatggcaagactctgtctctacagaaaaaatacaaaaattagtcaggaatggtggcacacctgtagtcccagctactccagaggttgaggtgggaggatcgcttgagcctgggaggttgaggctgcagtgagccgagatcgcaccacttcactcctgccttggtgacagagtgagaccctgtctcaaaaaaaaaaaaaaaaaaaggaaaagaaaaaaaaaaaacttagtggctgggaattgtgtacatgggtccaaattcctcctctgtgattaatcagctgagagatggtgggtgaatctcttcatgtctctgtgccatagtttcccatatttaaggaagataacaccttcctccaaccctgtgtccagacatccccctggacttccagaaagggtcactgagtagccaaaaatatcttctttcttggggatggaaatgcaagcatctctgagggatatggagtgtgtcggggaggcagcagcccatttctgggtatgctccactctccgggctgcctgggctggtgggaagctgtgggtaggcagaagcagccccaagacactctgtgcctccaggagctgctgtggctttctttgaggagacagcccgccagctgggcctgggctgtcagaaagtagaggtgagcctggggccctaagcggggaagggaggtgggcctgggcacttcctcaccctgctcagaccacctaccctcctgaccatctccaggtggcacctggctatgtggtgaccgtgttgacctggccaggcaccaaccctacactctcctccatcttgctcaactcccacacggatgtggtgcctgtcttcaaggtgtgtaaggggctggggaggtgggcagtgcaggccttggggacagacatgatgcagaccccaggattcaacctcaagttgctcatggtcctggccccagtcctgacactaactctcaacatccttatgacattacaccactcaagcagccttcatccagcagcaagttctgggccagagtggggtggggactggggggtgggaagcaggagacagcaatgggggatggcaatcagctgccttcttcagcccccgtctttcctctcccaccactccacctgtcactccaaccctatggtgggctcctagggcagggccactgttgaccagagtggattaatggctaaatttggggtttgggcccctcttcccatccctgcccccaggaacattggagtcacgacccctttgaggccttcaaggattctgagggctacatctatgccaggggtgcccaggacatgaagtgcgtcagcatccagtgagtgtcctccattcctactcctccacaatgtccccactggtccagtggattgamgcaggacctgagggggtgattggagaaactcaaggccaaggaayaccgtgacctcttggacaggaactactgccatgaccattgcatggatagggagattcagaccagagaggggcagggactttctggagtccctatcagggtgtggcagggtaaagtccaggacacaggactccagcctgctggccctgcctgtggggccagcctgcgcatctggtggctcccccagcacctggcttatgccccctcaggtacctggaagctgtgaggaggctgaaggtggagggccaccggttccccagaaccatccacatgacctttgtgcctggtaggagtggctcagatacctttgggaaaggggagggtggggcggggcagcctcctcatctcangtccctgctgcttttacagatgaggaggttgggggtcaccaaggcatggagctgttcgtgcagcggcctgagttccacgccctgagggcaggctttgccctggatgagggtgagcaggttggcaagccaatgagcagccaggcagggagtaggaggctgctagtggggactgagctgctccaccctctgaacmccctttccctcctcaggcatagccartcccactgatgccttcactgtcttttatagtgagcggagtccctggtgtaagtatgagcttggagggagggctcactctacaggcgggaggctaggccagaaagggcacggtcctatgcagggttgcacagcaaagttgaggcctgagaaggccttgaacycagggcctctacctcccagctctttcctatctgagcttctctgagggcaagccctgaatgggcagaaaccagctgtatgctacgggccctgagtggggacaggaccctgccagaggagcctggaatgagggggagacctgggcccaccccaggctgattgtgtctccagcccctcaggctgaagacactgccttccccctacacctccccaggggtgcgggttaccagcactgggaggccaggccatgcctcacgcttcatggaggacacagcagcagagaagctggtacgtggcaccccnggagggagtctgggagttcaggaggctctatcctgaggccactgtcccatttaacctcatattctcatagcacaaggttgtaaactccatcctggcattccgggagaaggaatggcagaggtgaggcagcctgggaggcagtggggtggctctgggaggcggtaccacagaggatagagtctgagccacctcttttatctgttgctgccgctaccctgcccccncaccacaggctgcagtcaaacccccacctgaaagaggggtccgtgacctccgtgaacctgactaagctagagggtggcgtggcctataacgtgatacctgccaccatgagcgccagctttgacttccgtgtggcaccggatgtggacttcaaggtgccacctccacctgggtttggaggagggatcctgggtcctcagtcttgtcctagaggcctctggaaagcctgaaggatcagctcgtctcccttctcttaggcttttgaggagcagctgcagagctggtgccaggcagctggcgagggggtcaccctagagtttgctcaggtatggacttgggacatgtgatgggagagtgtgggagccgggggagacccaagtgtgcaacagtggagtgtgtgcttggtgtgtctgcatatgtctgggcatttctttatctgtgacagacacattttattccaacaagcattcattgtagaggccactgtgggtgctggggaatgctgtggggagtaaaattaggcacagttcatgcccttgtatggtgaaacggggagatataaatcaaacatttatgtgatattacttttttctgagagaatctcactccgtcacccaggctgcagtgcagtggcacaatctcggctcacctccgcctcccgggttcaagcaattcttgtgcctcagcctccagagtagttgggattacaggcacctgccaccacgcccagctaatttttgcatttttagtagagacagtgtttcaccatgttggccaggcttgtctcgaactcctggcctcaagtgatccacccaccttggcctcgcaaaatgctgggattacaggcatgagccactgcgcccagccgtactttcatataacccatgtggtacaggaaagggtggccccttgcactctgaaaacctgtaactggagtatccaactagtctgagaggtctgggggagccatcttgaggaaggggcacttgggctaggatctgaaggatggacaggaggtaagtagacggagggtgggaaggtcccagacctaggacatttgaggggctgaaagaggacctgtggctggactggctacccagatgtctgggtaggtgaaggagtgggggtggggaggtgttatgtactaggcacagcccactctatgggaaatagggcaagatgcccaggcccatgtcctgatcctgccattcttcctgtccctcagaagtggatgcacccccaagtgacacctactgatgactcaaacccttggtgggcagcttttagccgggtctgcaaggatatgtgagcacgctggccagctctcctcacagcccagccccctactcctctccttcctgctgccccctcccttctccctccttctcccacctctttcccaccttcctttgccccttcaattcttcrctttctccctccccattcatcaggctctttctcctacaggaacctcactctggagcctgagatcatgcctgctgccactgacaaccgctatatccgcgcggtgagccacttgcatatagtgcctgggcagtggactgggcctgagtgctggcttttccctaacggctcttcctcacccctgcaggtgggggtcccagctctaggcttctcacccatgaaccgcacacctgtgctgctgcacgaccacgatgaacggctgcatgaggctgtgttcctccgtggggtggacatatatacacgcctgctgcctgcccttgccagtgtgcctgccctgcccagtgacagctgasccctggaactcctaaacctttgcccctggggcttccatcccaaccagtgccaaggacctcctcttcccccttccaaataataaagtctatggacagggctgtctctgaagtactaacacaaggacactcgtggagcaagaattttccttttcctggggacatgttaccatctccatttcacagatgaggaaactgagcctggctgttagcacttccccactaccccacactgctctgtgccccttgacacagcacacccattcagtaccatccagccatgtctgtgcctagcaagaaagggccacagttcctatttgagtggccaccatacttagttctgacctatcagggattccattcccattaaagagggatactaaggacctcaggaaccactcccatcttcctgggtgtacatctgggatcctgagacagtaccagaatagcaccagctgggcccctgctagatgaggggcaggcagagggccaacggtgactgctggctcctgtcaaaacctgtacacccttgtgttggcagcaggggccacagaggggcagggtccctggtagactaggtcagttcatcttagaggcctcagcaccctggatctgtgtgtgcagaggcccaggaactgggctttcatctcagccttgctaggacccccaggtagtaccaagagtaaactatggccccagtagcagagcctgatctagccagatctgctctatcctgttctgacttccctgagcatggggcaggagagacagggctggggtgggatagttggattttttaagtttctagttgtagccagaagtccagagcctggctctgggctgcaggcttagtactaatagaaataacaatcactcctgctcacagttgacaaggagccaggacttgactggctttttttttttttttttttttttgagatggagtctttctctgtcgcccaggctggcgtgcagtggcgcgatctcggctcactgcaaactccgcttcctgggttcacgccattctcctgcctcagtttcctgagtagttgggactacaggcccccgccaccacgcccagctttttgtatttttagtagagacggggtttcacctccgcctcccaggttcaagggattctcctgcctcagcctcccaagtagctgggactacatgcgcgtgccaccacggccggctaatttttgtatttttagtagagacggtttcaccacgttgaacaggatgatttcgatctcttgacctcaggggatccgcctgcctcggcctcccaaagtgctggtgagaggtgacagcgtgctggcagtcctcacagccctcgctcgctctccccgcctcctctgcctcggctcccactttggtggcacttgaggagcccttcagcccaccgctgcactgtaggaacccctttctgggctggccaaggccagagccggctccctcagttcgcagggaggtgtggagggagaggcgcgagcgggaaccggggctgcccgccgcgcttgcgggccagctggagttccgggtgggcgtgggtttggcgggccccgcactcgcactcggagcagccggccggccctgccgtccccgccgtccccgggcaatgaggggcttagcacccgggccagtggctgcggagggtgtactgggtcccccagcagtgccaggccaccggcgctgctctcgatttctcaccgggtcttagctgccttcccgcgggtcagggtttgggacctgcagcccaccatgcctgagcctcccaccccctccactggctcccgtgcggccccagcctcccccatgagcgccgccccccgctccacggcacccagtcccatccaccacccaagggctgaggagtgcgggctcacggagcaggactggcaggcagctccacctgcagccccggtgcgggatccactgggtgaagccagctgggctcctgagtctggtggggacgtggagaacctttatgtctagctcagggattgtaaatacaccaatcggcattctgtatctagctcaaggtttgtaaacacaccaatcagcaccctgtgtctagctcagggtttgtgaatacaccaatggacactctgtatctagctactctggtggggccttggagaacctttatgtctagctcagggattgtaaatgcaccaatcaacgccctgtcaaaacagaccactgggctctaccaatcagcaggatgtgggtggggccagataagagaataaaagcaggctgccggagccagcaggagcaacccactggggtccctttccccaccgtggaagctttgttcttttgctctttgggtccacactgcctttatgagctgtaacactcaccaccaaggtctgcagcttcactcctgaagccagcgagatcacgaacccaccagaaggaaaaaactctgaacatcagaaggaacaaactccagacacgccaccttaagagctgtaacactcaccatgagggtccgcagcttcattattgaagtcggtgagaccaagaacccaattccggacacactgggattacaggcgtgagccaccgcgcccggcctagactggcttgcttttcattgaacccttacagcagtcttgtgatggaagccgggtcccactagtgatgcaggaacaggctccattggccgggtgcggttgctcatgcctgtaatcctaacactgtgggaggctgaggcrggcggattgcctaagctcaggagttcaagaccagcttgggcaacatggcaaaaccccctctctactgaaaatataaaaaaagtagccaggcatggtgccatgtgcctgtggtcaagaggctgattctggagaattgcttgaacccaggggatggaggctgcagtgaaccgagatcacgccactgcataccagcctgggcgacagagcgagactctctcaaaaaaaaaggaaaaagaaacaggttccactaatatagtttgccccagacaacagagcttggaggtgaaggagttgaaactcaagaactgggaatttgtgcttcctgagcacaaggcaggttccatgtacaagctggaggctgagggtagcagttggctgtaaccttaagcccagctgaagccctgacctggcctcccccctcagaccggaacttggtaaagggatcactcctttttcatggcaggatggctggggaaaggagaaccttcacaccccatgtccaggacaccagcacagagacctcactttggaagtcatcaacctggtggcctgtctgggccaaaccaccttcagaacacagaacctgctcttgctccctttcaaacccacctccacctgtcatgccttggcaaggggcagttggccacccagagacttccaggattacagtcaagagctagcagccccagctctggttgggcaattgaaacctcctagggccccacatggactgcctagatcaaatgctacccccaccccttcgtaggttcattatcttcaatattttctcacccgtgaaacaaagataatcataatacctacttcagaagtaggggatcacatgccatgggctgcacctgcagctgtagcataacagcacccctttaggagtttctaaagtgtccgaggttggaccaaggctggttttgaggattaagtgcggccaggaagtgcccacstggtgccttctataggcagcctccacaaaggcttactattacttcagtactttcttcactgactgctgaggataaagacctccatgtgaagcagctgacccaggggcacagaagggtcagaaccagtcacgggagtaaggcagtgccactaccacctgccttcctgggtccctagctgttgggggactaacatagcccagagcagtggatgctgaccaggtgcaccaaaagagcccaaatctgggacacctcaggccagagtgcagagctgctcagcggggccccttcccctcccttgcagtaagctttaagacctcatgaggatgtttaagatttctccctttgggccaggagcactggctcacgcctgtaatcccagcactttgggaggccgaggcaggcagatcacaaggtcaggagatcaagaccatcctggctaacacagtgaaaccccatctctactaaaaatacaaaaacaaaattagccgggtgtagtggcaggcacctgtagtcccagctacttgggaggctgaggcaggagaatggtgtgaacctgggaggcggagcttgcagtgagccgagatggcaccactgcactccagcctgggtgacagagcacgattctgtctcaaaaaaaaaaaaaaaaatttctccctttgctcggcaggttacacagtccagcaagctatgtgcccgagcttcccaaaagcccccaatcatttctcattcattaggtcctcctcttgcacttcagggccccatctcctgactcccacccacaccccaccatccagacccatgtcttctcccacaccaacagatggagcaaccaaacccatccccaggatcatagacagaggctaacaaatcctgcctcaggtttatttgtacaaatagcacaggaggaccccagccccatgcagatggtagcccaggggcgggggtggggggtcgcaccagtccttctgtcctcatgttggcagagatatctactctgaagcctttgtaggggcctgggtacgtttgggagcctgagctggaactgaagctggggctgcagcctgggccttggtttgatccttggccttggccttggcctttggccggcacagcctgagccccttggcaatacgggcacgagcacgcttcccaagcttggggtgggcaatgtaggcaagtcgatcgagcttgcggctgacaccctttgggatcttgggcttaacctccttgggctttacgagggccttgatagcctcggcacgtgcactcatggccttggcattgttggcctgcatcttctttaggccctttttgttgtgcttcttggcaaagcgcatgttcctcaggaacttggggtccacctgaaaagcaggaaaggtacaggtggcagcatgtgggtccccaagtctctccctgctgcccctctccataggggtacccagcattctaaagacagcatcaagtcaacctcaaatgtggaaatacccaacctcttgaaactatttccagagaaagtgtaccaccaccccagggagccaatacgccacctgggtaatgctgtgcagacctccttcaagaacaaaattacaagctgctttgctgccctgtctgccaaggttgtggggcttcaacttcctacagcaggggttcgaccaagttttttcctgacatcccctcagggacaccccctcccctctttagaagaaggtgtcaattaaataccaagtctggtccaaaagacttatagccaaggtgggatatggggaaactgaggctcagagtttgtgattcactccacggaacagagagcaaaagtaaagggaaggaacagactggggacatgctcagctctcccctagaccctccagccttctcagctaatccttagaaccccctgacacaggaagagaagctgaccccaactccagcactgggtcagatggaggtcataaggctggtcagtgtgggaatgtgccctgcacgcactcagacaaggccactccttaccctaagtgccactgccaagcaagggagatagccaaactgccctcaggaggcaggttacaccctgaccagagggttacacttcaggctgtggagaccaaggaaagctttattatgggtctggtagggtagaaaaaggaattgcaggctttgggtgggccagttaggctgtgctcaggcagaagccaaagctagagaaaaactacatgagaggccttgactgtgcacctggaaccaagaaaagacacttccatgtgattcagtgcactcacccccttaagagattcgtatctttgtgatcggggtttcttgataccatttctgtgccattttcgggctgtgggagaaaaaaagggaattaagccaacaaagaactttcctctaataagaccacccaacatcacagctggcaagtctgggagaaccaacacttcctacagc

SEQ ID NO: 96127 - DNA, 18587 bp, Homo sapiens
  misc_feature (1)...(18587): n = A,T,C or G
aggtgtacaagtgctggcagctctgggcctcccaaatgagaatgagcttgctgcggtcaccagaggcctgcagggatgaagacaatgatcacaggcacccmccatgcaccagacctcccgcctgcccccagggccaacctggccttacaaggtacttgccgtcggaggagatggccatgcagaggacgtggctgctgtggccagggggctttccctcggcacccttcttggctcgaggaatcacatgcagcttccgtccactctccacgctccctgcagttgggggtgggggagaagctactgggatggggggatagggctggctggcaacccccctcaaggggcagcatggaaaaaagagccatggcaaatgtcccggactcggccagaagacctggctcagccaccgtgagcctccggacaagctgcctcagtttcctcatctatgaagagggacattagtgccaaacagcagccacaaagcccaaaaaagagaagggatgtaaaagggctttgggattgatggtgtgagttcttctgttactacagcgggtgtagaaggaaccgctggtcagccagcaacggatgggaacccaggaggaccgggcactcaatcccaggactgcacagcctcaaatgtcttctagtccaaccacctacctgcagcattaattcccattaaatcatcatcctgactttgcccaaaggtctctagggacagggagctcataagccccactgccgggcagcagctttcactgtcacccagagagcactcctagggcagcaaacctgcctccagagacttccccacttcagggctcagcctgccatgaccactcccactcccctgaccagccctcccggatccgccatgggggctccagccccacccaggcactcactcacacttaatgatgctgcagtctttggcagcagagaagatggctgagtcatcgggggtgacgaccaaacatgtgatagagagctggtgcccccgtaaaacgcgaatgtcagctgaggctggggcctggatctgggcagacaggggccaggtcactgtggctagtggcataaaggcactaccttcaccaaccccactgcgtagtgttggcctttcccacccaggccagaaggaaaacaagacccaaggctacaacaaccagatccttacctgaccagataggcccaagtgtccaccatgttccaagtggggcccccaattccctccaaccttataccaaaataccatgcccactcacctcttttgccaccaacttctgcagcctgcccctctgctcaagctgcatggagaagagatggatgagaccctgggagcagatcagctccacccccgtcctcccccaactctccctccacacttaccacatcctccttcaggcgccccgccacctggtcctcctcaaatgcacgggcctcagccttctcctcctctgtgcaggacagaccagaccaagtaaactgaggctgagacccctctttcccttccatcctgtccccatcccactgccccagggctggataatgcaggaagctccagctgcctcagcagaggggagggcaagctggagggtttcctcctgcctttacttatcagatcagccccctgcgggctccccaggaggcccatgagagcttctggccacccccacagggcagccagcactgacagcctgggcacccactgggaatccatgtcagtcacccatcaagtggctggggctgcagcggcgggcagcagaccagcacaggcagaagccctgcccatggctggcctgcccactggctcaccttgctgacggagctgctctaggtagagcttggccaagcgcagcttcttttcctgtgcagtttcctccagctcctcctcctcctcctcctcaggcttccttggagctaggctgtgggcaggaaggggctgggtctgaggggctcaccttgttcctctgaccgctaggatcgtgccttctggatgctcaccttgccatccaacctcccctattccctgctagcccacatggtcggtgactacactgcagaaaactgaaggatgtgactccccaaactaaaaggccccactcagtgccccacgtaggggtggaaacagacccaaatcccaaagagatcactaaagcctctcaactctgggggaaagaggaggcttccaagagaaaccaggcttccaaaagaaatcaggtcacatacaaagagtcaggaatcaaaatgtgcaggcatctcaacagcaatactgagaacaagaagacaaagaagcctcacacacaaagctctggaggaatacactgacccctaaaatgccatgcccagtcaaacaatcaacgacgacactgccaggtgtgcaaggtgccatggaattttctccctctttttctttaggaaggatagaagctgtgctcccaaacaagagggtaaactgggaaagagaaaggcaagggataccggaaaccagagatgcgacacaagagagcagaaagggtgacactatccccagacatgacgggggcagtctggatcagatccaaggacccaccaggcagacacaccaggactgtcatcaccacagcaccatcctttaccctgggaacaaggttccaagcgaaccttcactgtttggggattggcctttactggtgaagttacggctttcccctccatgccccagcccccggaccagctgagagtactcacttcacccaaagacaggtgctgctttgacctgctcctgggagctgggggtaggtcatgggcactcagacacagagaatccaaggcagcccactccctctgatcatgtgcctgaagacatctagtctctgtccactcccctaaccgtgtttcccaagactcactcgtaaacctgcccctgacttccccagaagggaccttgaaaactctcaggaaagccaaagctggaccatgccccagaaataatttagtgccctgtgcctggcaagccttcagccaacagggctagtgctgcccttcccttacacagccaagggacctgtgttaacttcggacttctactcaatttagccaaactaattaatctattgttgaaggattcatacgcatgagacagaacgctaaagaaatgcaagggaagtacacactatgattccatttacagggcatgctagaaaatgcacaactctaggggcagtggttagcagagacttggggggaaggagaggggctgactacgaaggagcaggaggagttctggagggtgatgaaactctttaccttcagggtagaggtggtcacacaactgtgtgtgtttgtcaaaactcactgaactataactttaaaaagggcatgttactatatgtaaattatacctaaatggaaaatgttaattttttaaaagaagaacaaagaaaccaaagaaatgattaactcaagttaggaatgacagttgcggcttctaagtttctgcaaatgttctagttcttaacctaagtggtaagtaagtgtacagaggtttaccattttaccattactctctgtagtgcaaatatatctcattcacttttctgtatctaacacacttcacaacacaacattctaaaaatatttaaaagcacttagcccacactagcctggcacacactcacccacaataaccttcggattaagaaaagtacattaatggctgggtgtggtggctcacgcctataatcccagcactctgggaggctaagatgggcggatcacttgaggtcaggagttcgagaccagcctggccaacatggtgaaactccatctctactaaacatacataattagccaggcatggtggtgcaggcctataatcccagctactcaggtggctgaggcaggagaatcacttgaacctgggaagcagaggttgcagtgagccgagatcgcaccactgcactccagcctgggcaacagagtgagactctgtctcaaaaacaaaaaaaaaaagtacattctttccatgagcaaattaaggcaacacatactcaattttagaagcgagttctaaagtcaactcatagggaaggcactaggattctctggtccaagagcctccaacccacagggtcaggcctgacaccatgcctgaccctttgaaaacctgcaagcaaccacacccatcacctgcagaaatgagggaggcatccaaagccctctacaatctacatgcacttatgaccagtcctcctgtttttgtgtgtggtttttttttagagacaggatcttgctgtcacccagactggagagcagtgcatgatcatagttcactgcagcttcaactccctgggaagggatccccaaaccttagcctcctgagtagttgggactacaggtgcacaccaccatacccagctaactttttttttttgtacagacaagatctcgctatgttgcccaggctggtctcaaactcctgacatcaagcaatcctcccgccttggcctcccaaagtgctgggattagaggcatgagttaccaggcccagccccctttcatcttttctactgcccattctggcacacttacacctcagactttcctctgatcactgaatgccttccctacctctccgtgagagactcctcttcatctctcaagaccctatttaaatgtccctcctctgttcccagaacacacaactataaaatacacacctcactacaacacactctcttcacccgcctgcctatctctgcacttccaacagcaaaggcagtgcctggcatgttaagagacggggagcccagtaattgtgaaattgcaggaaaactggcaagggaagaaggatgcaagaaatacttgacagctttgttctgttttcctgcaatttctcaatcagtccagtccctgccaaaacctaaggaggtctcaatggcctcggattggggcccagggtccttcccacccagagacctcgcagaaacaagactttgcaggaccagaaactaaaggaaacagccacgatctcagagccaagggacagagtcttggattctaggctcagttctgttcggactcactcagtcttccgtgcaccatgggactcagttttccctcccactatgtggaaaagaatagctcacctctcgctctcagagtcgctggagatctcctcattcatcttgccgccacccttggatttgcccctgtcccccgcagagtcggcctgggaattatacggtcttttctttggtcaggggtccagaccaccctggcattgaccaagggcccccccycctcggttccctcagaaccccaggaatggggaaggcggtggttcccgggttaagcgaacggctttctaggatttggcccgcggagagagggacgaagctgactccagcaggggtccagggcgaagggctggggaagggccgggacccaggtcccctggatgggatgacggttgtcccagtagcagggctgaccgcggccctcagaagcgccatgctcacctttcgccgccgcttgccggcccccgcgccagccccggccccagaggccrgctttccccgcttacgagcagccgctgttgccgacatgctgcccaccaggcgtgtagcagcggccgcagaactcacgtggcagctgaaccctcccagctccccagccgcctggcaagaccccgcgtattgataggcttccaccgcccgccgggccccgcctcctactgctccattgggtccttctgcaggctctgccacgcccccaggcacccataggatgcacgcttgtagccccgcctcctgaagttcctaggctcccgcaccaggctcgagtaggaagcccgcatctccacggcgcttccggcctgatgctgtggcgcttgcgctctgctgctggcccacttcgaagtcggagcaagagccttctctgtgtttgcgccccttggccgctggggggcgccagagacgcggcgccctttcgcgttctggaacgtgactcctccccwmcatgggcagcccggcgctagacccaacggggatccaagcagccccggggagagggaggctgcgtctgtatccgggcccaaggtcaccgcgcgaccggcagatgcgtgctgcaggccccggccacatgagcagcgctacggacgcgactgccccggccttggatatgccagatcgagtgtccacccgtccgtgggactggtcgcctgactcggcctgccccagcctctgcttcaccccactggtggccaaatagccgatgtctaatcccccacacaagctcatccccggcctctggcgattgttgggaattctctccctaattcacgcctgaggctcatggagagttgctagacctgggactgccctgggaggcgcacacaaccaggccgggtggcagccaggacctctcccatgtccctgcttttcttgggtgagtgtcctatggtcctgcccacggcagggcagggcaaggcctggtgggactggcctttgccctctatcagttcaaggccactgatccggagttctggctcctcagaactcttgagtccattgggaagggcttctacagctctgggttctaagctccgggaggataatctggccccaagaatcctgcccccaggatcctctgcccaccctcccccatagctcggtgactcggcccggcaaccatgccagggctgaactagctgacacagggggaggagccccgaagtggaagagagagagcctcctttcactttccctacccctcaggacacacaggtgagctgcagagggtagggagccaggcagaccctgttgaccagagtgggcagactggacagagtcctaaccttgcacttgggactggggaaaggggtgtttctgagtgacaaagagcygggtgtggtctggggctgggaatgccgtcagagtggacacaggatgcagtgggaggccaccgaagggccaacccggggtggggcaagttggtgctgtgctggcccagggcaggggtggggactgagagtgggtcgttggggatgaggagaccatggaggcctaagggcctctctgtgccccaggacagccatggctccaaagcygaagccctgggtacagactgagggccctgagaagaagaagggccggcaggcaggaagggaggaggaccccttccgctccaccgctgaggccctcaaggccatacccgcagagaagcgcataatccgcgtggatccaacatgtccactcagcagcaaccccgggacccaggtgagctgcagtccccagtcaggcccagagcctgcccactgataagcacaaacacacccaggccacccccttaggactctgttctggttttggagcccaaggcccccaggtaagcgccagagcaaggccatgttctcctgaccccagacatcagggctgtgtcccgtcaggtccaggcgggtcacatctgcccttcagaccccatgcaggcctcctcccaccgcacttagggaaaggctgtgactacatcagtctcctgggcgcttgcccatgtcccctcagggcagagccatgtccctctcagattcccccatccagggcccagctgtgtcccccccagcaccccccatacctccatgtcagggtttagccatgtcctctcacaccgcatcccctagggaagagcagtgacccccccaagcttccaagacagggtccctctgactcccactgccgtcagactcctgtccccatcagagccctctcggtgtacggccaggcaccccatctgaccccagccagcctgccccccacctcccctctggcccaggtgtatgaggactacaactgcaccctgaaccagaccaacatcgagaacaacaacaacaagttctacatcatccagctgctccaagacagcaaccgcttcttcacctgctggaaccgctggggccgtgtggtgagtgccctgcctgctctgcacatactccccagggtcctcaaaaggccacagctactgacttgggggggcacctcccaactgtcccagggcrctcagcacagggcctggcccgacacacaggccagcaaatgctgatggtgggcatacccctgaaggctgtcggttgcagggagaggtcggccagtcaaagatcaaccacttcacaaggctagaagatgcaaagaaggactttgagaagaaatttcgggaaaagaccaagaacaactgggcagagcgggaccactttgtgtctcacccgggcaagtacacacttatcgaagtacaggcagaggatgaggcccaggaagctgtggtgaaggtgagatggccaaggaaggtgggcaggccctggactgagggagggractcgttggagagttcccgctggttgggctctgccactgcccagctgcgcagcctcagccacagaactcccytctggcctcaggctggctggtctctgtctggtgtcacgccctgccccgctgctcctgcccacatgtgccctctatcttcaggtggacagaggcccagtgaggactgtgactaagcgggtgcagccctgctccctggacccagccacgcagaagctcatcactaacatcttcagcaaggagatgttcaagaacaccatggccctcatggacctgggtgaggggtgagaggcaggcagggtggcaggggcctcagggtggcagggctgtggggctgagtctccccactcccctgtccccctagatgtgaagaagatgcccctgggaaagctgagcaagcaacagattgcacggggtttcgaggccttggaggcgctggaggaggccctgaaaggccccacggatggtggccaaagcctggaggagctgtcctcacacttttacaccgtcatcccgcacaacttcggccacagccrgcccccgcccatcaattcccctgagcttctgcaggccaagaaggacatgctgctggtgagggctggcaggggtgcgggcaggcagtggggcactgaacagacagcctaggcgagcgagatgaagggcaggtggccaagaaggcccagaaggatggactgcctgggcaggctgacagacgggtggggaaggctgggcagacagatagggtggggagggacaggtgggacacacaggtggggtggctacaataccagtcatgtgagagaggagaggggaggccagaggtcaagtgggaagacaaactgccagggcccatcatcctaggtgctggcggacatcgagctggcccaggccctgcaggcagtctctgagcaggagaagacggtggaggaggtgccacaccccctggaccgagactaccagcttctcaagtgccagctgcagctgctagactctggagcacctgagtacaaggtgagttgggccccacagaggggccaggctatcagtgggcactgtccctctgcccacstgccctcgaggtgcccagaggaatactcgccctcagccttctcttcctgtgtctccagggcctgaggagggcttgggactgggggaagaaaaatgggggattagctcctgagcctcccaccctggcaaccagcttctgctctccccacaggtgatacagacctacttagaacagactggcagcaaccacaggtgccctacacttcaacacatctggaaagtaaaccaagaaggggaggtgagggaggttcccccacctctcccccatcaccactgtgccttaggaagatgtccttggctaatcggtcccttagcaaatcgtttagcagctctggtcagtttctgccggccatgagtgcgcgtgagtaagcagagggacactaggccttggtcacaagcagcagggcaaggcgactgagtgctcgggtggcatcactcccatttctcacttcctctccactcaggaagacagattccaggcccactccaaactgggtaatcggaagctgctgtggcatggcaccaacatggccgtggtggccgccatcctcactagtgggctccgcatcatgccacattctggtgggcgtgttggcaagggcatctactttgcctcagagaacagcaagtcagctggatatggtgaggtgcccctctgggccaagccctgggagggttggcactaagatggattgggcccagtccttggccactggaaattcatggtgaatccaagagaggaatcctttaatggttaatgactacagtgctcagtgggctgtcctgggctttggtggcggggggtcttagagaaagtgtctgatggtcagggatggcttcctgggggaggcaatacagataggatgggtgcaccaaccagacctgggagggggtaaaaggggagcctttgagccaggtgtggtggcatacacctgtagttccatctactctggaggctgaggcaggaggaacgcttgagcccacaagtttaaggctgccatgagctatgatcacactccagcctgtgtgacagagccagactccatctgaaaaaataaaaataaaaaagaggagacgtcaaggcaaggggataggcagagaggctgggaggatgtgaggatgtggcaggtcagggcttccaaacacttcctgatactggagctcagagcaatgcctagccgggggcagggtgggctaggggcccagaacgatcgaggaggctttatccagagagtgatggttagcccagctggacttgtctgtagcaggatcccagtggctacagctgtggagaggggggcagyagccagaggctgcagagaggccatcctcttatccaggctggatgtgatgggtgcctggcccaagggctgggaagtgcaggggagggagcccatgagaggggcatgtaggagatgggatggggagcgtgtgggaaagggtcaaggctgtctccagtgacttctgagtttctggccaggagtgtcctcaccaaaatgacccccccagaccagctcctccacccaggctgtccccatcattggaggccaccacccagctggccaagagagcaaggaccaaggattcatcccagaacagatggggctgaagttctaggatgcctgaggtcaccaagagcaaggggtccaccaggagggcagaggggcttaggaaagagtggcggggtggagggcttaggagagccagcgcgaggaagtcccaggtaggggctgatgatgtcaggagcaaagtcagcagagcaggccagggagaaaagcccctgccacgggtttggtcactgggaggccattgctgaccttggtgaggacagcagagggtacagatgcctggccatagggagcacagtgaggtgggagggagcaggccgggacaaggagggagtgacggttgggggagagtgagccttttcttgctggagcagcaaagccagaaggaataacatcgcagcagagaggggccccacaggtcagcaggaggcaggctgagctgcccaccggtgcctccctgtgtcttgcagttattggcatgaagtgtggggcccaccatgtcggctacatgttcctgggtgaggtggccctgggcagagagcaccatatcaacacggacaaccccagcttgaagagcccacctcctggcttcgacagtgtcattgcccgaggccacaccgagcctggtgagtcctcagaagctgtacagcccaaggagagaggtggggccgagataggggctgggacattttcagggagggggctgtgaagagggacaaaaagaagcttccctgtcgtcactcagtttgtcatttgacaaacatccactggttcaacacatcattcctgggcatcccggagggcttcaaaaagaggagttgttgactgagcattgaaggattagtacaagtttcccagagagaagtcggggaggacaccccaggcagaagccccagcccctgcagtggtttggaggtgggcaaggtggaaatgagcaggcgtgccctgtgacagacatggagagcntagggggcaggacttactcgtaaggcctgggaccagtgacccctgggccaccctggcccttgctgtgccctgcagatccgacccaggacactgagttggagctggatggccagcaagtggtggtgccccagggccagcctgtgccctgcccagagttcagcagctccacattctcccagagcgagtacctcatctaccaggagagccagtgtcgcctgcgctacctgctggaggtccacctctgagtgcccgccctgtcccccggggtcctgcaaggctggactgtgatcttcaatcatcctgcccatctctggtacccctatatcactcctttttttcaagaatacaatacgttgttgttaactatagtcaccatgctgtacaagatccctgaacttatgcctcctaactgaaattttgtattctttgacacatctgcccagtccctctcctcccagcccatggtaaccagcatttgactctttacttgtataagggcagcttttataggttccacatgtaagtgagatcatgcagtgtttgtctttctgtgcctggcttatttcacccagcataatgtgcaccgggttcacccatgttttcataaatgacaagatttcctccttttttaaggctgaatggtactctgttatgtatatgcaccacatttcctctatccgttcatctatcagtggacaccaagctgcttccatatcttggctattgtgaacagtgctgcagtgaactgggaaagcagacgtctcttgaacatactgatttcatttccctttgatgtatacccagtagtggggtttctggatccatatcaccccttcttgccaggctcccctgtgtcccagacatcgatcccccttccctccaatccctgttagccttgatgtgtctgtggccccagagtcttgcctcctaaagtgatgggtgtggtacgggcgtattacagggacacagatgcagcagcttactcaaggggcacagctgagagtggcttggatcccacatccacccaggccgtccatcctggcctggactgcatgttggagccatgtggtcaccaaggtaggctaaactgcaggcatgtgcaagcagctttactaaacatggtattctcttgccccagcctctgcctgtctgtgccacaactgtgctgggcctgggcctccagccacactccagggagcgagcgctcacatgggttgatgtggatcatgcacatactccttgcccctcctggtccatcactgcaacaacctgcttcctctaattgagccttcaagggggacccccactgtctactcagaactatttgtcatctggggacccacctggtgattctgtcctttatcccagacattgccaggtgaatcaagcattcttcatgtcttggcaccaaacatccctttgtgtctttttttttttttttttttttttgaggcagggtctcaccctgtcacccaggctagaggggagtggtacaaccactgctcactgcagcctcagccttcccaggctcaggtgatcctcccacctcagcctccagagtagctgggactacaggtacatgacaccacacttggctaatttttgtgttttttgtagagacagagttttgccatgttgcccagtttggtctcaaactccagggctcaggtgatcctccttcctctgcctcccaaagtgctgggattacaggtgtgagccactgcacccagcctcctttgtgtcttaatctaaatgttacaaacaagctgagcatatgtcagaggggcacagctctgcaatcatgaaaggaggctgttcaggcaggaatgccagtgatcaccaggcaggtcatcctatccacagacaaagggtgccattgctggaggaggccaacatccaggctagggttgcacattgcatttagttgttgtgtctctttagtctcctttaatctgaaaacactcctcagccttttttttattttataactttgacattcttgacactcttgaagaatacaggccagttgttttatagaatgtctatcagtttaggtttctctgatgctttgtcgtgattagatttaggtattgcatgggcaggaatgtgacataaatgatatgccctagggaattccatctgtaggggcatggcccattcttggtgatgttaattaattttaatcatccattaaggtgatgtccgccatgtttctccacggtgaagctaccatttctcccctttgtaattaatcaataatctgtggggaaatattgttgggtgtaaatgtccctttcctcatcacctttcacccactagctttatccatcgatgataacttaactgaaatcaactacctgaatcaatttttgctaagatagttgcaaatggtagttatctaactccatcatttcttttatctgtattagtttctgtctttattatcagtgtagactcatggatttttattttattcagtgagttataatccattactgtcctcaattattttgatcctcaaattgtcccagatttggccagcagaaggtcccttccgtgtcccgatcattttttgagcacatcctttctctctggcatcacaagatgttccaggttcatctcgtacgaaccgggaatcagccatttctccaaggagccctggttccctggagcaggaaatgtttagaatccaagatctgggcaatagatgtgctccttggtactgaggtgtcattgcttttaagtccttccagcaaagagagctaaggaatgtgtctatgtggctgggcgcaggagctctcacctgtaatcccagcactttgggaggtcaaagccggaggatctcttgagcccaagagttcaaggctgcagtgagttatgattgcaacactacattccagcctggatgacagactgagaccctgtctctaaaaaaataaaaaaggaaaaaaaaggggggagacagaatatgtatgtgtgaataaatagcaaacacatctctctatatctatttctccagttccagtcaaacaccacagagttcttccattcttccccaattccctatttcctcgattcttaaacagtaagaacctgggtttctatcaacatcaatatatctacttatttgctcaatcctgcacaaaaaggagtttcagaattgccatacccataccctgtgaaaaacaaacattytaaatagagctcaagatgtatctgatcttactcagtattttttttttttgtcgttagattgagggtccatggtcaaagtaacagtttgaatacacgttcagatgttacttggattggttctttctcttcagtgtggttattttattcgtctgaaatacaggtaggctcagtcatttctgtctacattcttctttgttactttattgttttcaatatgtagaacattaacatagttccaaaaggtccactctatgcaagctgtgctcagaagagtccttctatcccccacactccattcctactcacctgctggagggagccagtttcattagtttctggcatatccttcctgtgttttttttttttattttgttttgttttttggaaattttgcaatacacatacacacatacacatgctaaggaagtgttttaattttttatttatattaatgatgtcgaagggagcatgaactctgcaacccaccacagtccccacccctccctatcgcrttccccagtccacttttctcatttgctgttcccacttggccccaccgagctctctccaggctctggtaactcaggggctgccccaggcctacagggctgcctgggtaaggaccaaaacttcaaaaatccatcttcacctcctagaggcaaatgcccaaattcaagttgtagccaaggacaggaagggacagctgtgtggacagagctctaggaagcaaaactcagctgtgtgacctgggacccatttctccactctacttttctcatctgaataatggagaactgcgctggagccctttgaattccagcacaaaatcagttaaaccaggaggtccatgtcctgtcttcaccatctagatctgcagcaatgctgaccgtgtgtctgtgaggggtgctagggccacaggcacaagtgaggctcagatgaggtccctgctgtcatggagcttacattctagtaaagcaggctctaagcaaatgtatgcataaatatgaaataccacagcaggtagggaaagtgccgggaagaaaaataaagcaggataaaaggatttgagtgatgggaaggtggaacaattttagaaaagatggtcgcaagctgggcgcgatggctcatgcctgtaatcccagcactttgggaggccgaggcgggcggatcacgatgtcaggagatcgagaccatcctggctaacacgatgaaaccccgtctctactaaaaatacaaaaaaaaaaaaaaaaattagccgagcgtggtggcgggcacctgtagtgccaactactcgggacgctgaggcaggagaatggcatgaacccgggaggtggagcttgcagtgagctgagatcgtgccactgcactccagcctgggcgacagagcgagaccccgtcccaaaaaaaaaaaaaaaaagaaggccgggcatggtggctcatgcctgtaatcccagcactttgggaggctgaggcgggtggatcatgagatcaggagatcaagaccatcctggctaacacggtgaaaccccatctctactaaaaaaaaatacaaaaaattagccagggtggtggcaggtgcctgtagtcccacctatgcgggaggctgaggcaggagaatggtgtgaacttgggaggtggggcttgcagtgagccgagatgtgccactgcactccagcctgggagacagagcaagactccgtctcaaaaaaaaaaaaagatggtcgctgaaggtccctctagagcagagacctgaatcatgtgagggagcaagccatggacagatctgcagcaagggtgttcttgcaatggaaacagcaaatgcaaagaaactggcttgatgggcggaaggaacagcaagcagactgctgtggctagaaatactgtgggcaaggaggagggtgagctcagaaagggatggaaaaggtagataaaagggcctagctcccttttatctgccttttttttttttagttccagaggagctgagattctattctcatctattctgatgatgggaagctcttggagggatgagagctgggtcatgcccccatctgctttgtttttagcgggatccacttcagcccctgtgtagagagtggactatagagtatacgtcagttaacaaccagtcagcaaaacagaaattaccctaggtatttcagacaagggaaatttgatacagggaaagaattgaatgaccaaatgggggatgatgaggcaatccaaagatgagcaacagccggaagtcactactactcttaagactggagagataaaggaagtgaatggtgctctgatgccaagaggctaggatcaccctgcaggagccagaaccacagagggggccacctgaagggagcccctggctgagcttcagagggaaataaatcctggcttcttccctcctcccatctgccagtcttctgctggtaactttcattggctgaacatacccaaagtcagttgacaaaggagcctgggaaatacagttcccaggaaggcagtatagcactggggaagaagggaatgaatctgagggcaaacaggcagatggccagcacaaggtgcaggagctgaggccgggagaccagttagaaggatgctgaaatggtccaggtgagaggtggtggtagctgggaccagcttgatggtgatggtgagaaatggcaggattccagagacctcagcggactggatatagggcgtgggggagagggaatcatcctgagatggacactaagatggagaagattctgggaggagcaggttgtcggggagggatcaagagtcatggttctgttttggacataggaagtttgagatacccattagtgaaagtcctggtggggaaatgttgaaaaggcagctggatacccgtgaaaagaggaagaggcttcagatacaaatgcaagctatcagactatagatagggttttgccatgaaactgggtgactttgcctgggggcatatgccccacgggagttacatggctttccatgagccaacgacattggggtggggaaccctgacattcactgattagtcaagactgggttttgtgcctaatcaggaaaatagagtgtggggatcttgttcacccaaatttcctgtcctgagaattggggaggggtggtttcctaaagaaaattcagggtgtttagccaggtgtggtggctcgtgcctgtagttccagctactcaggaggctgaggtgggaggatcgtttgagcctgggaggcagagattacagtgagccaagattgtgccactgcattccagcctgggcaacagagaccctgtctcaaaaaaaaaaaaaaaggaaagaaaattcagggtgctgttaccaaaaggggacctgtttgctagcagcaaaaacaaaagcaaacaacagcaacaaaaaaccaaacagcatctgcctgctaaggcctcctctcac

SEQ ID NO: 96128 - DNA, 19827 bp, Homo sapiens
tttctgcaggaacagaaaccaggccctctcgacatcagtcccaacttggctcccagcagagttttaaatgctcatttgcctaggctgaccagcccagcagatccccattgctctgaggggggaccccatgcctgggagagcttggaatggagggcagggtggggcccaggaccttggtgacctcatgggagatgggacttcaatgatgaaagggaggctaatctaggggaagaagccacagaggtgaagccccaccctagaccctgcaggctgaggtgcccttaagtgggtagagggtagaaaatgctggacttggcccggtgcagtggctcacacctgtaatcacagcattctgggaggctgaggcgggaggatcacttgagcccaggagttcgaggctgctgtgagctgtggccaaactactgcactccagcctagatgacagagcaagaccctgtctcaaaaaaactaataataaaaataaaacaaaatgaagtaaaatgctgggccccacaggaaaggattaggagaaggtgcagactgttgcaatgaggcagggaaggcctcctgaagctgtggcccctaagaagctggagatgatttcagagggtgggggcatggaatgaaggcacatgtggaggcaggggcactgtatctggcacacagtgtagggagcaagcaggagaaagtcagggtgagctgagctagcggtggggacagggagggcatagctggtctggctatgaactaaaacctaagcaaataggttttagctttcttgcctatgacaatcagctggtcatgcctgcttggaagggttttgagaccagggcatggctcagcaagaaaatgtgctgtggttgactagtaatgtctgccagggacaaagcatggaagagcagtagatgtgtgtcctctgttttccatccttgggctggccccttgggctgtgattggaaaggtacaccctcaagtgagtgaccccagggactccacgtggagaggctggccaagggcttgccctgtcactgctgggtggggagctctgagagagaagaattatgttggtctgtgccatctgagtccccccttcactgtcctgcacactccctggtatggggcaggtgctgagaaaatgtctgagaatgaacaaggaggcttccctcttggccgggctctctcctccctcttccctttgccttctccaagcagccttggggattccccacagatctcccaggcccttgcttccgtcctgccatgtcttgtgctctaatcatcctgggtgtgacccacttttctgccagggctacttgctcccccaggccctgcactctcaccaggtctgccctgtacacctgggcaggagagggagcagataaataggcatgtggctcccccaccccagagctgtcccagctttcccacactacactgccattacccagggcctggcaggcccctgctggaaaggcaggggtggaccccggttccatccagaacctgttgctatggagataccagcaacagccaataggacaatgtgagcctaggtgactagagggctgaggggagaggaccgtgcatcccgccagcttggtaaccacccctctggaggacatgtctgtgggtatcccccaataggagtggcgagcgcccagatgtgggtctggaagcgtgtgtatctacatacaacagagtgtgtgtgcacgtgtattgtgtatttttgcacacatgtataggtccttatctgtgtatttctgtacatacacttatgtgcccatgagcatatgtggttatatgggtaggactatgtgtgttggtgcctgtgttgtatgtatccttacatgtatatgtgtatgtgtgcagccaggagttctatacagggcagaggagttgccatcccttcacagtcctctcctggcctggcttagatgctgctgtctgaacaccggcccaggcaggcaccccaccaagggttggggaagaagctgtcccaaagttcaagggcaagcagaccaagtctaggtctcagcaggcctccatcggagcacctctccagcctggtggagctggtctgggcagaggctggcttactctccagcaacaggcaccagagactgctcagcccttgctcatcccttacagtgggatgtgagacagacccatagtagaaagctgcctccttagcttagatttgtgccagcctccttaggaccaggagggcaaggagctgaccctcccctcgcctcagcctgtccattagaagcatggtggcccgtttgcaagaaatccatgggcagtagtgggaaaaggtaaatctgtttcttaggcacttgaactgttctgatgacacagctccttggtcaaccagccatatgaatgtgtgtgttggggggaagggggtacatactagctcacatctgctcttagggaccctcagctcctcccagaggaatagcaaagggccatgaaacatacccaccatggcgaggccttgtgctgccaggaaggccccttctctgtgtggttctgaggttggatgtgtgcagacagggaaggcagctccagacgtgccttgtgggttcaggcctggcagttggctgatcgcgatgagaagggatggcaggaggagcagcaggcttgaggcagggcagacttgcccctgggcgttccgggtgaccagtgtggtgtggtagtggatggtgttgggtggtggacagtgactgtgatagggtgcagagcaaagatggggtgaggaggggacggggtccttggagcacccagcagggaagctaatctgggcccggatgatcagaggaggcctctgtgctcagagactgagctgggatcagaaggcaggcaaaggctgaggatgaaaactgtccaggcaggggaaatacctgtgcaaaggcctggggctgtgtgggaaggagggacagccctcagagagttcaagcatgtcccacctgcacttcccctctccctcctgaaacaagctcatccccagggacagagcttttccagcagcctctttcccactcccccaccctgcccctcagggagaccctagtgagctggacacccctcctgggagctgcaggtgagggaaggcctgaaccctaaaggcaggaaagaccacatttctaaagaggaagaatgattccaaggccttggaatcacccagggcaccaggttgctgccaagaacgaccctctcccttgagggaagcctacagctgccaggcaaggccccggacagggacagctctggtctcttgccatgtgaccataggcgagttcctgccctgctctgggccttgtaagtctgggattgagggttcttccccacagtgagaaccaagacttagggcctttcctccaacctcctccaacctgcccggtgggggcccagggtcctgctggcacatcaggggctggttaattttcctgccaaccctttgcttccactgtcaccccctctccacatgctcccccttctcctgcactcatccaaatctgcctctctttacctccttgttagaggacgccctctcctcctgctgcaggagcttttcacacattctcacagatctctcctccagggtgtatcccccactacaggagtctaaagggagagagacaggagtcattgcaggctaatgtgagggatggcgggacccctttcctctctctagggtagttcttcctcatgcctgggtagtgggggctggggaggctcagaggaggctcccatttcagttgttcccttgctagtgagagcaatggcccattcctcaccaggcactcagaagcgagtatgcttcagcgccgtgggacacgcgcccagtctcacttgaggacagcatgagccttctgttgatgtgactctggcctgcccctcagggatgtcaccctgacttattgggcacttgacaccttcttgagctaccatggacccgtctggggagggaacaccaagaccagtctctgccctagagaaagaggggtctgtgttcatcctgtggtaggcctgggagagcacccagaccggcatccaaccccatggtggagcagaggggagaggtagccaggcctgagtggaggatggaggctccactgttgtcactccggctccaggcaggctggtactcaggaggccctcagcaaggcttgctgagtgaatggtgcactgctcagcagctcaccctcccctgggagtttgctcaggcctcttttttgagtgctgcctccatccctgacaagcagcatccagcctgccagccgagaggcctgtcctcagaccacgtcctcccagccggatggattcatagacggattgggctcagtccacactagcactctcctacactgggagacccaaggcccagagggaagaaccatactaaggtcacaggacacacctgcaagtggcaggacagaatctgggtcttggcatcttgggccctggaagctctttccacaggcccaggacccccaggacaaccttgggcggagagttgcttctcctttcacactctgagaatgtgactgtgggagagacccctgctcctttgggatacagccctgtggcccaggatgaaactcttccgaaagactatccctcgcttgaaagacaggcggggactgctcctgagtcaccccttttcgtgccttctggtcagaggttagcggaaagctcaaatcctcggggttccagaggccgtccctcaagcaccaccgctcccccagtcagggatgggggcaaggtgtctcagagccgaccagcctcgggcggagtcggggggttaagccccaaggaggggcaccccgccaggcaaaagaatggaccagatagacggcagggtccagcctcaagctgccaccctggctccgtagggaaagcactgcaggtcctacgcaagcgcgccgcctgcgtctagccgctttgttctagcgctacctgcgggtccattcacctccgctgccccgcctgcctgcaaatcgacacacagggcgggcggaggccccgcccacttccccgccctgggtggaaaccgcggcgggccccgcctccctccgccaccgcctctttcggccaggattggccatctgcatggcaggcgcccgcctaccgcggaagttgattggtccgttgagagggaggcaggggaaggaaagctgattataaaggagcattcccctcccaccggccccgtggaaaaagtcacgtggcgcttcactgggcgcctgtcaccaccccgcttgtaaagctttcttaaagggctcgcgatcccttcccaaagctggtcctttcyaggatttctccacacctgcccacggaaggtggcacggccctgagtcttcctaccccgccagttgcccaggtcctgatttcccatcaggcctgctggcgtgagacgctctccctcaggtctggagcctgtgaccgtcaggggaacgatgaggtcctctgaaacggtgaccgcctagcacagtgcctggcacgtagtaggcgttcagttctcatttgttgaatgaactcgatgacagaaaaaatgaatgggatgacaggcgggaggaggagaggttgctcagcttgaccatcccccccaccacgccccgtcccaggaaaactatgctgttgtgaatgtggggtgggggtgccaggcataggacgcccccagggcctctcttcccgcagtgtccagaagagcttgggagcacgcgcagagtgaacccatgagggcgtctaggccggggtccctaggcggatcgtagtcagctccgagctagtccagggggcaacggtgcggaggcggtgggggagggccccgccgctggtctcccgggctcgggtcgcgagcgcgcccgcataccccgtggggaggggcggtggaggcgctgcgcctttaagcccgggcgccggcccccgcggccccgccccccggagaacgcctcggcgcgcggccgccggagccgccgtttaattggggctgtcaggccgcggtgcgcgcggagggccgggcgggcgggcgggacggaggccgggaggccgggaggccggggcggcgggcgcgcagctcggcgggaggcgggcgcccggagacgcggctggggcccgcgcggccggggcgccgtcccagggcagggctgcccggccccggccccgggccgcccgcgctccccatgaaaaaccagctccgcggccccccagcgcgggcgcacatgtcgacttcgggggcggcggcggctgggggcacccggccggggtccgagcccggtgcggggtcggggtccggcgcaggcaccggggcgggcgcggcgacgggggcaggggccatgccctgcaagagcgccgagtggctgcaggaggagctggaggcgcgcggcggcgcgtccttgctgctgctcgactgccggccgcacgagctcttcgagtcgtcgcacatcgagacggccatcaacctggccatcccgggcctcatgttgcgccgcctgcgcaagggcaacctgcccatccgctccatcatccccaaccacgccgacaaggagcgcttcgccacgcgctgcaaggcggccaccgtgctgctctacgacgaggccacggccgagtggcagcccgagcccggcgctcccgcctccgtgctcggcctgctcctacagaagctgcgcgacgacggctgccaggcctactacctccaaggtgagggcggcaccgagacgccttacgggatcggggcccccccgcgactccctgacgccccccttggaggcgctttcctctccacgcgctcggcctgcccctctgggcgccacgtcgtccccggcccgcatccgccctcctggagccgggtccccactgtgtggtttggcaggcgcggggctccctctgcgccccctttctcggcacgattcgagtgggtggaacaaactttcccctgcctggggtttccttttttttcctgttgatggggcgacagtagtgcctgggctccagtggagcccctcagaggtggaaggcgccgcctcccagaaccctaaaagcggcagggcgcccaagtccagcctagaattcgtgtttctggaaggccaggatcaggaagggcacctttcatagcaccatcctcacctccagcgcatggagaccatttgggttggggtctcctggatccgggaattgcttcttccaccggagaattgccgcctctaggaggcgcttggggcagggtatgggcaggctccattgccctggcccgggtctctcgggacccccaggtccctagcctgctgccccggagcttgcagaagggagaggtagcaccggggggcgagtggctgaggccggtgtttccaattaacattccaaaatggcctcttgctggcagcggggcgggcgggaggggaggggaggcctgcggcaccctcgggcgcagggcccatgcctcgctgcaaggggctccccatttctcctgtccctgtatcgccccagtggccctcccccgctgcaggtccaaggctgggggtggggcttgtgttctaagggagggttctagagaagtggagccaggacccccttcaaaaacctgcccctgctgggggaaggggccagccagtaccttcccactaccctccccagctgtagtttcggggctgggcaaccactagactcccgttcaggaagcccaggacctctctgcctctaactgagccagatgtggctctggcacctgtggtctcatctataagaggagtttgccaacccagaggtgctggctaagatggggttgtctgcttttctttaccacttagctgttactgaacacccatgggtgctaggtgtgcgtgggagctgcagaagaggaattagctggggcctgtcctcaagtgccctaaagctggtgccatggctgggggcccygaagtgttatgggtaccagtttggagtccaggcacgtcacttcaccttctggggcctcagtttccttatctgtgaagtggtcatggtttagatggagagaacacgagagagggcacacgtgtaacatgcttggcatggcccatgctgaccgtgggtgctgtggtgtttggcgtgcagagtcctggccatctctggtcttgtgcagcccatctgggctctcaccagcctctcacccaggccctgtctcaccctggacacaggtggtttcaacaagtttcaaacagagtactctgagcactgcgagaccaacgtggacagctcttcctcgccgagcagctcgccacccacctcagtgctgggcctggggggcctgcgcatcagctctgactgctccgacggcgagtcggaccgagagctgcccagcagtgccaccgagtcagacggcarccctgtgccatccagccaaccagccttccctgtccagatcctgccctacctctacctcggctgcgccaaggactccaccaacctggacgtgctcggcaagtatggcatcaagtatatcctcaatgtcacacccaacctacccaacgccttcgagcacggcggcgagttcacctacaagcagatccccatctctgaccactggagccagaacctctcccagttcttccctgaggccatcagcttcattggtaggtgctgtgtgctgggcaggggggtgtgggtgcatcaaggtgtatgcaggactstgggtggcgcccccgcctgactgggtacctctgggcctgttgagacctgtgtgtgccctacgtgtgccagcgtgtgcccgtgggtgtacccaggcctactgtgagtcaccgagtcccttgggcccctctacctgttggggcctgagcagtctcctgagtcctgagctccccctagctgacagcacgtcatgggctctctgctgtccagcttgtgttttcctggcttagatgttgtttcgggcttagcaagctgaaacatcacagcgcacagacctcccacgggtctcacttgctccgcatcacgcctcagcacacgtgtctctccaggatggggttgtcatagtgcctctttgggctttaatgtggacctaagagggctgaaaggtagccctggagccagaggcacaccccaaacaggcagctattgaaatgtggtgactgctagctcagtcagcctccagatgctctctgcagcctgtagggcttgcttggagtgtagggaggagtgcaagagaaggtgggggagtggagaaaggccttccccagagcagtgtgtcctgctgtctggcttagtgcccttcgagtccctgtatccccagcctcagcagactcgggtccccactgctttctccttggccagctggaggctgagaccacaggtcatctcccctggcccagggtgcaaggaaggggcacgagggctcaggatgaatgtaaacgctctatctctgagcctggtgacccaatgtttctgcccagcctccagtggcaaggtgtgggggtggcccgggctgtcttttcccgatggtggctgtgtccagtggagggcgttttggtgtcggctgggctgggctagctttaacaacaggaagtgggaggcttccccgcctcatccgcttactgggaaccaaaagtaggtgcctggctgggaggaaggaaggaagctgaggcctgggggaggggctgcaactggggctgcctggagcttctcagccctgcccaccaccccctgggtcaagagggctaggggtgctgcctcagcatttgaactcccccaacgagggaggggaatagagagagggaagcaggcttcgccaggctgggcctggctagtgggtacctttatccttcctgaaagctcctccccgtctgggtagggggacctttttcctcatttgacaagtgaaggaattgaggcccaggcatcccttaggagtcagtgggacaggatcagtcaccagctacaccctgaaaaggccaaaaataaagccagcagaaacagactgtctttggatcacctggaggtgggtttggaggccaggcgttcctcacatcctggtgtcaccactggaggctggtcccagcacccccttttcccacccccaatctcgaggtctgaccacacagctcctcatgaagctgcaatgtctgtctccttgccagatgatcctgccccagtgccttagccatggggccccctgtcagtccctgagtctggaggaagcacctactgtatgctttactccttggttgggaggggatgggagaggaagctctgtcaggacaaaggcaacgaagaacagtgggtgaacccgtatgtcatcttgtaggaaggcattgattgcgtgctagctgtgtgcctggctcctggagggttcagagtcagggtggtggggacatcaaggaccccatggctgcctcttgtgaatctatgtccctggcacagctgtggcacacagagaggcagctgccccggggtccaggagagattacaggactgagttgttcagtagctcggccagtatttattgagcttctatgtgtcagacagaggagtctgagggtggcactgggggaagctgggagggttggaggggaaaggggacaggaaggttggccccatccagtcagctgtggtaggagatatcactgacacatgggcctcctgaggaaggtctagcaagtggcaggggtggggcccatttaagcacacctcacttatgaagccccatcacaagtgatagtgtggccatcatcccagtccatgtgtcttaggagctggagttaaggccttggggactagctgggcagatggcagagcgaaatgcagggccaggccacctacttccttccagaggagcctccctcaggccactttcctagaagactctcagggacaacccatgggagcggctccaagagaaccagcccagcccccagtcccaggtcatggcctggcagcagcgggcgctgagctaggaggagcttctgtgtggccttgggcttgccactttgtctctgtgtctgtttcctcgttgataaaatgggcttactggccatggtgcagatgacccaagaggatgcaggtgacacccgtgacagcagtcgttaacgcacatggcagtggtaggactagccatgatcacaggcattacagtagttcatgtttgttgacccctcacttggctcaggtccttatgagaccactgtgcataaataggcccattttatagatgaggaaacagacacgggtgtccagtgccttggggctaaagtgtgcagagccctctccacagcagtgctgttgacctctattccaagttgctgccctacccacactgggcttggccaggtccctcargggtcgggcaagaccagccagccaccatgctgccctctgtgccccagccccacctgcccacccatgtgggaaggctccttgaaggaggcacctccctgacccatgccaatgtgtttcagacgaagcccgctccaagaagtgtggtgtcctggtgcactgcctggcargcatcagccgctcagtgacggtcactgtggcctatctgatgcagaagatgaacctgtcactcaacgacgcctacgactttgtcaagaggaaaaagtccaacatctcgcccaacttcaacttcatggggcagctgctggactttgagcggacgctggggctaagcagcccgtgcgacaaccacgcgtcgagtgagcagctctacttttccacgcccaccaaccacaacctgttcccactcaatacgctggagtccacgtgaggcctggtgcacggggggcatggcaccaggcccctgctcggctctccacagggctaggtgggagagcccaagcccgccacctctggcctgaggaacccccagatgtcacctgtgcccagaggcccaggctgatcggtgtcggagcgcccctcaccatccttgggggcagggcccgcaggcaaggtctcccactgcagggcttgctggagaggcctcggctcttggacacgtggctttgggcgtccaccagggcctcatcctgtccaggacgctcctttctgctgacagcccagccagtttggctgttttttaaagacacatccacggacctgagtttactttttacttttggcaggtaaatccaagctccctggagcacaaagagtgtttgagctcttcttgatttttcttttttttttttttttttaacaaaaagtgttattttcaggctacatgcaacagtggattgtataacccagtatttcatccctttcctgatcctgcaagagagagaaatgttcagttttgtttttcgttcaatttcaaaaagcaagtatcgtgtttgtttttgtttttgttttttaatggaaaagacagacgccatgttgacyttgaccaaatgcgttttgcacatgtgtgaagcctctgtttcytcagcgggcccttcttgaaggggtggcttactgctcttcaggtattgggacccccagtcgtgccgcctcccacccttggcccagtctgacttagctctgcattcgcctgtgatgactgctgcaagttgtgattggtgrgctggatggtggtctttgcattttctgccgtctcatccatccctctggtggtccctgcagacctccctgaggcagaaggtggggaccctggggccctgccgctgtcccccaggaggtgggccgcagggggctgccaggcagtagcattagccctctggggtcagcccctaagaaggcctgggctctgagcccttttatatacttagccactacttctgtctgtctgtctgtctctctctcttcctctccctctctctctttctctctctccctctctctctctttctttctctctccccccctccctctctcttcctttcctctctcttgttgtaactgggagtggaggcccagtggctggggagacattaggtggtggggcccagcccgacctccaggttcttccttctccctagctgttgctttggtctggccactcccagcccccttgtccccttggaagcttgccctgccctcatcttgcccatgccttctactgccaggagacttgcacccatttcaaccctagggcgggggcaagtggggcaaggatggaccagcagaaggggggtaaggctctgttcacttccccctgcctccacagaacgaagccacggattccgttatcttcctccagttttgttccttctccagcctcagttccaccaggtgtcaggactgcatgggggcctggggcaggcagaggagtcaggccagggtccctgacggagcagcactcagcatgtgagtgaggccacagaaaaactctgccccactgcttcttacctcacgggggtggctttcagggattctttagcgcagcagattaaaatcttgccacagtcgagaaattgacaacaagcttccatgctgtacatggttctctttttctctcttttatttttaaaaagaaaacccagaaagatgtaccagatttgtgtaaatgagggtatgccagaaggtggccagttttgctttatgatcttatgaaggaagatttgtgaccctacgtatatatatacacacacatacatatatatatatatcccgaaccaacaacgggactttgtttatattgcaaataaatattattttttctttaaaatgagtcgtgtccgataagggcttggggcctgggaaggaggggaaggagtgctgtcgacaggcatcctagtgcctgctctgtgtgaggcactggcctggttctgcttggggtctgctggccacttagactaatcaaggtgccccgcagatgggagggagcagccacagtttctggatgaagctggggcaggtggcatttccccagcccttaggcactggcaggcagaggcatcagggctttctctgtgggcttctgctgaaatcaaggcttggagaggttgtatataccaagttgacacaactgagtcctgactcgcccttcattgtctgaggctgtctgcttaggcattgcccagattgcagcccccaggaccctaactctttctcttgctgccgtgtgggtgagaggggaatgtgcatttaaccctgcccctgcaggtcctgagatatcagtgggtagtgacaggtcagcccttctttgcttcttaagggctgggtggccttggacaggtcccttaggccgattgcacctggttcctgagtgcttttcagctttgtggcatgaagagcacattattggcctgggctcacagggaggaatcagccgtgctcaggcgtgtacaaggaagggtgggcatgggcctctgtcaaggctcccctgggggtgggggtctaagcgaggccctgggctagagcagggaggaggtctggagaaggatgggggccacagtctggggaagtgaggccccagtggacaacaagccccgagttacagatcaggaaatggaggctccagagtggcttaggtctcccttgcctctggctggatcaggtgagccccagtcaaggacttaagaggcctggaagctgactcagtttccccatttctgacattccccagctctatcccttcagcaaactgtgtgatcagcactgagctggatccaggtggaaggtaggtaggtagggccgagagggtgagggcggctcagcctgggacttgctctgttggggtgcccaaggctctccttctcttctctccctcatctctgctcttcagttagtctgcaccagaacgcagtcacaaccatcatgcgcagcctgtggagaggggtagagggcagkttctgcccactgtggggcctgggtgcaaatctcagctgtgtgactgcagtccctcagttctaccccctaacactcccatgtggagcgtggaagaatcctgccgctcagccggcaggcctctgtgggtaggagggggcttcttgctgcatcctcgacaagggggcggtgctgctgttgctcctgggctccctcagggccctgttccttctgtgccaggggcaggcaaagggggtgggggcctgagcaggcagagactgggcctttgttccctcctgctgccctcgcccaggcctggggaagcccgcgggtgctgggctgggggctgggccctcgacaaaccgagtaagtgcctggcagtgccagcgtgcccaagcacaggacggggtgggggtgggagtggcagccgcctcctgagccggctcttcagacggaggactgggactgcctgaagagggccagccccgccacttacccctgtgcactctggggccagtggtctctctgaccgtctgtgtcctccttacctgtagaaattcctacctcagcactgggcctggctaaggttccctgctgggggacagagggccaggtcatggctgagaggctggggccctgggtccttgctctgtgaccttgggccgggccacgcttactggactgtggtcccccacccctgggttttgggctcccatctcatggccccgtgtcctgagctcctcctatcccaccccgtttctgccatgctctccccagcgggccctgcttgcttcaggccatctgtggctgaggccctcagcgcagccgtcctgagctcttggacacttggctctctgggggtgcacctgctttatctctgtccccagtcctgttgctctcttgagcctgtttgcctccttggtccctgtttctgcctccgtttcagcctggaccccggggagctggtccactccttagccgcttagtgttcccatgggaggaggatccaagacacttactcacttgcacattcatccagcagccatttcctgtgccggctgggcagtcccagggagggaacatgcccgagggaagctcggtgatgtcacactgggtggcaggataatggggccctcaacttgtcctctgataaatgaatcaagtgcaacatgaggactgactaaggctggatacgaggaagcacttggagtgctgtggagcgatgaccttgaaggggttccgacaagaccgcaggagagatgaacatttccctagggtggtcccgctctgagcctgggggcagagggagccctcaggagagggccctgctctgcctgccacccccacagggcccctccccagaggaaagtcattcctcatgaatggaccagggtgggggtaggtggcaagcctgcactggagcctgcccctccctgctactgcccatgtgctgtgcacctgggccaacagcatgactgcactgtacctccctctgtgtcagaatggatgtgtctgggacaccaacacctacccccagatccttggcagaagccagagggcctgatatgggagccagctttctctgtagggagcacagtagcatgttaacctctgggtgccccgatggagggtgttcaggtcctgatccttgacatcttttcccctgctttctttgggccccaccaggacacagtgctctcacctgactcctgagacccagcctacctgagagccctgggaaggctcgggaatcactctgcttcccagccctgtgctgatggggaaggtgaggtttgcagaggggtgtcatagagtgaggcaaggtagaagctgggccccccaccctgctgccctgaggcttttcactaggccctggctctgtgagggaccagacacacacacacacacacacacacacacacacacacacacacacacacacacacacacacacacacacacagctttgccatcctctgactagacaagcccatgcaggtctcatagcaatggaggagccgcctgcctgtgactgtagcctcctctcatcagggtgtgtcctgggtgaagtcatccctttccaggcatggtcattaaagactatcattagcaactcttagaggccttggccccattgtctctggctgggtcagatgagcccccacaggtgaccgtgacacagactccggccccttgctagaacctctctttgcccaggcagccagcccccttcccagggctgtcctatcgcacacttccaggggccattgtctgccgtgtagcttccgtgcatgtgtggggtctccacacgcctccctccatgccttcaactcctcctctggcctcagggctgcaggcagaggagaagctgcagtgcctttccacagggcgtcatgggccagggaggagcctctttaggggacaggggagcccctagagggcatcaggcacagggctgatggggtctggctgtcacaatgaagatctagttggtgagtgagagcggcctgaaaggcaagcgcgcaggccaggggacagggaggaggccaggacagtagttgagggtgggtcaggagtgctggagagggtgtgggaaggacacatctgcagaccagcaggacttgggccccatgggaatcaagacccatggtgtgaacagagggtcccagcttgtctgatgccacatccacagcctgaaagccagccgctgtgcctcgcagaaggattaagcttagcccgggcatgcgtgggcccacgggaccccgagcccccactcacctcccctgagggaagcttgcctcaccctcattgtgccaccacatgctaggcgcccagggagagccaaggggccccaagatccttaagcgtcctggaagtcccccaggacagcacagccctgacggcccatctcagagcctccgtttcctcatctgtacagtggggataagaattgccaattcaagaggagagagcaggatgaagggcctgttgcccacctagacctctggaacaggagcccaggtgagttcatttagctgtggcatccccaccgctgctgaggggcacctctccggcccaactattgtcaatttgctgtgtgatctcggacaagcctcctcccccgttcagttctccaattccctgtttccactgatgagagatagaataatgaccctgaggtatctggccctcagattcagcaccacacccctttgagcctgcctctggtcccccaattcgcatgccccaaacctagttctctcctcaccccacagaacctagcatgggggcttgggatgaggctcccggtggaggaactacaggagcaaaggcccagctcacacttctccccagaccactggcaccaggcccctgcagccctattccctagccgctgggagagaggcaggctggataccactgtccctccccggttgctgggactcaggtggtctcaccagcacctctgggcagggagtctgggtgtggttcttctgcatctcagattctttccctgggcctcatgcccagaagtggcatttctgggacaaacacctctgcttccatttttccagactggcttctgaaaggaaagcagagttgtttgtcttttacgttcagctattactgttgctgatttagagaagccacgtgttggcagtgccaggaacacggcaggggcccaggacagctctgggggctgaatcattcctcggcgtgaggtcctgccatggctgcccctcatgcctggccctgcctgggatctgttccgatgtagtcggtcacctggcagttcaaattgcagtaagagccataataataacacacagccatggcccttgtgctgggccaggtgtcctgcaggctttacatgataaactcacttaatctccccagcagctctcggagggggtgctggattatcccacatggacagatgaggaagccaagacagagaactgcaaagccatgtgtcaggaaggggccccactggggtctgggcacaggtctggctgccttgagagtccctgctctcaactaccccaggcctgagaggtcaggagacctttgggttttgaccccctcccatccctgacaccagctgggctcccacccatgccagcccgaggaaagcagcatgttgtgggaaggagcccggagctccctttctgaagggactgcgatgcacctgtaggttacctgggtggggcaggggaaatggaagagaagggctggcaacagctggggaggcttgggagggagtgtccagtcagggctgtcctcctggagtgcacaggctggaggggcagagagtcagggacacccagttccaacaggtaaggtagtctgggggcatctcccagaaggggacatcttctagtggagatgaacctcttgctgttcctgcttccagcctttgtgcatgctatttcctccccctggaatattctccacctgccaccacccccttcaattggctccctcttttcttttcttttcttttcttttcttttcttttctcttctctttctttcttttcttttctttcctccctccctccctttctccctcccttcctcccttccttccctctttctctctctgtctctttctcttctttctgtcttctttttttgacagaattttgctcttgttgcccaggctggagtgcaatggcgtgatcttggctcactgcaacctctgcctcccaggttcaagcaattctcctgcctcagcctcctgagtagctggaattacaggtgcccaccacccaccctgctaatttttgtatttttagtagagatggggtttcaccatgttggccaagctggtcttgaactcctgacctcagatgatccgcctgcttcggcctcccagagtgctgggattacaggcatgagccactgtgtctggcttcttttcttttctttctcttttcttttctttctttctttcttctttttttcttttttctctttctttctttctctctctctctctctctctctccttctctctctctctctctccttccttccttctctctctctctttcttttttttttccagagtctcgctctgtcacccagg

SEQ ID NO: 96129 - DNA, 18466 bp, Homo sapiens
tcagggctggccacaccctaagccttgcaaaagggcctcctgcaagggctggcccatggggtccccaccttcccagccagtgaggttagcatggttaggagtccacatgtgtgcaagtgcttgtgtggaggctcatgtatgcatgtgtgtatatgcaaagctgcacatgacaatgtgcatgccagtccagagttagatgtacctatgcagttgccctcaagcgaagggtcatatttggaaacaaggatggctctaaacatgtaagcgtgcatgtgggcatgtatgtatctggggcctaaggaggtggggaagtgggtgttggggtaagggctggccttcagggcatttgcagaaggaggagtgggtgggagggaaaggctgggcagagcaggggaaggagtgaaagccaggcaggaaagtggaagaacaggagaagctcatgtaatggattaccctccacaggattatgttccttgattcctgagagttttttctcttgattttaccccctcagtctatcactgcaagagaaagaggtagaaaagacaaacagaccacaaaagacaagaacccagacatatagacagacgcacctgttgcatgtgcatgagccagagcctgggagagaagagagagcgtgcaagagagagctcagagcaggcaggcagcccaccccctgcagcagtgctgggcttcactggagcccctgcaggaagtccagcagccctgtatgccactcctctggtttgtccaggtaacaggggtgccccgcccccttcatgatcagcacccggtggttgggcagctgcttcaggtgctcaaagctggtctgacccatggggtcctggtctccatatacaatcagagctggagtctgagaggaaggataggggggtggggcagagtcaacagggacctgccatagcatccccagccctccccacttcagtctcttcctgggaccaccccatatgagggagagagacaagctggcccagtgggtgggggcacagattggtgtctgccccagaacacagtttagcacagggcttggcacagtagtctgctgagtaaaccaaaagggtggagttgggtggtcagctcctcccagaagacaccccttgattatccagcccccagatgaggaaagcccagggatgcacccttccttgctcctggcaggggcacctcagcttcccacacaagggtaccttcacactggcatagttggcagcattgattttgtcagtgcagatgggggccactggcacaaagcccgggagctgggagccaggggccgtgaggaagggcagggagtacatgccactcagtgatggactgatcacaaccggggggcccagctccaaggcatccaccacagccgccaggaagctgccaggggccagctccccaataggggcaggggctgctgcttccttggagtgccccagacctgcagggattcaggtgtgaaagagacaagacaagggcagtgaatggcaaaacaagggagatggttgctctctccaggaagccctcctaggtcagtttctctgtggccaggttcctgtaacacccagtgtgcccacgtttattcctacagtagcctcattctatcttatcgtgccaagcatgaggcacttctctccacgtctgtgcctgtctccccagcagtaagtgtcctggagagaatcaggctctgaagcccaagaagtctgggtccagaacccaattctgcatttattgtctatgtgaccttgggtaggtccccctcagtcctctctcagctgctcagtttccccatctgttaaagggggataacaaaagtatctgccatttaagattgttgtgaaaattaactgtgtgaaaggcacctggccctggattgggacaagagaggctcctgaaggacagcagctgaggggtcggttctgcagctcctcctccagtcattcaggcttcaccaacaagattagctccagaccttcaccctgaagctcaagccaacccaccattggaatcaatcctgcctgggcaggaggctcgcccttgagccctgaaaccataccatccctggcctgagggggtggggccagccatgctgctcctttcacacctggcaccgagggttgggacccagccatctgggttatgacaggcagtctgggcactgatcccatctaccctagaacccagctcagggctttgcatgtgggatcacaagtgggggcctggccacccaccaggccctgccttgtcccccagaagactcaggtctcactccttagggcttccaaaagcctatggttattattcagtcaaaatactttacttccaattggctgagcaccgattactctgtgtcaggtactagccacatactcacatggattatctcattccattctcattagagcgagcccaaaacatgagtgtggttatctcccattgcagatgaggaaacagaggctcagagacactgagacaatgcccaggtaacagtgaggagcagctgggcggtgaggaccacatctggatcaagactgctcagaggcccttgcagtgtgcttgaccaaacgctgtcaagttcagggcccagcctggctgggtcctccagatcccaccgcccccacccctggagtggggaggggctacatgttataggaacctggccctgtccctaatgagacctccccaaaccctgcccagaagcctgccccttaagtacctggcaggtcaatggccacagcccggtagccagcctgggccagcctgtgcagtgtacccaggttctgccaggtctcggaggagaagcgaataccatgcagcagcagtacagagaagcgagcctgcccactgccgggcagggcctctcggaagaagagggcctggccctgcacctggatggtgccctcgcgctgctccacgcttgctgccatgcctgctgctgctgtgctggtgaagggcctgtggttcaaaaccacgatgatgaggggccacagaacaccctgcccagggtggcagtcccagaggagcagcaaggaagcctccaggaggtttccagaactttaagaacatgccttggggtcaggaggacataggtgttatttctgcctctgccatttactttagtgtgtaacctggggcctcagcttcttgatctgaaatatgggaacaataaagccaacttcaagaattagcaatttaattaaaagtttaagaaaaattatcggccaggcatggtggctcacgcctgtaatcccagcactttgggaggccgaggcgggtggatcacctgaggtcaggagttcaagaccaccctggccaacatggtggaaccccgtctctactaaaaagaaaaaaaaattagccaggtgtggtggcacgtgcctgtagtcccagctactcagcaggagaatcgcttgaacccgggaggcagaggttgcagtgagccgagatcgtgccactgtgctccagcctgggtgacagagtgagactcggtcacaaaaaaaaaaaaaaaaaagagccagctgatggtcacatgtaactctcattaggccaggcgcggtggcacacgcctgtaatcccagcattttgggaggccgaggcgggcggatcacctgaggtcaggagttcgagatctccctgatgaacatgcagaaagaaaccccatctctactcaaaatacaaaattagccagctgtggtggcacacgcctgtaatcccaactacttgggaagctaaggcagtagaattgcttgcacccaggaggcagaggttgcagtgagccgagaacgcgccattgcactccagactgggcaacaagagaaaaactccatctcaaaaaaacaaaaaacagaaaaattatcagtgggggtgcctgctgtaaaacctcaatatgtggtggggctccattacaattactgttcttattctcatcgttattatccttttctataaatggggataattcaatagtactagctcataggtggttgataggattaaataaggccatgcatgtaccatgcctagcacgtagtaagggctcagtgctcaatcaacggtaagttacaggtcatgagttgtcaatgcaggccagagggagcccaaattggggtaaaaagcccattttattttattttattctatttatttattttgggacagagtttcactcttgttgcccagaatggagtgcagtggcatgatctcggctcactgcaacctccacctcctgggttcaagcgattctcctgcctcagcctcccgagtagctgggtttacaggcgtgcgtcaccatgcctggctaatttttttttttttttttttgagacggagtctcgctctgtcgcccaggctggagtgcaatggcacatctccgctcactgcaagctccgcctcccgggttcacgccattctcctgcctcagcctcccgggtagctgggactacaggcacgcgccaccacgcccggctaattttttgtttttttttttttagtacagacggggtttcgccgtgttagccagggtggtctcgatctcctgacctcgtgatccgcccgcctcagcctcccaaagtgctgggattacaggcgtgagccaccgtgcacggcctaatttttatatttttagtagaaacggggtttcatcatgttggccgagctggtccggaactcctgacctcaagtgatccacccaccttggcctcccaaagtgctgggattacaggcgtgagccaccgcgccggaactaaaagcccattttcttcggtttttttttttttcttttttttttttttaagagaagatgtctcgctctgtcgtccaggctggagtgcagtggcgcaatcatggatcactgcagccttgaccttcctgggctcaagtgatcctcccggctcacccccagtagctggaaccacaggcgcgcttccacaccggaaagcccattttctagaggcggaaaccgaagcgcccagtgggaaaggcgacccgccggggatgcggggtgctcaacgcgctgccacctggggcccaacgcgttgacctcgcggtcaggttgcttccgcggactacggttctggctcgctagctctggaagggagcaccgggagggaatggtggcaactcccaaggaggggacccagggatccgagaaaggaagacttggggtaggtggggttggattttgactggagagaagaaagggtcaggagtgcagggcgggtacctggggagctgcgtggactcgcgcagacgggaagcaggcgcgtgctggcggtgacctggggccggaggaggaacgctgggaagaggccgggccccatccagcgggggcggggactgggccgtgctccggggcgccctcttgtggccacaagctcgcagcgtccatagactccgctaaactcgttctcacagcggcgtcagtttcccaaagcctctcggtctcacatgccccaaacgcggtgctgagcacggtttcgaactcttcagcgacctgccccacatggacatggagcagtctgaggaggaaagttccttcgggatcgcatccttgctgctgtcttcctgctccccatcccccttatccccagcttgaactgcccagggcaacttgttggcctggcacggagttgaggcccgacaggtttgagtgcgaggctccgccagtgtccagccaagtggccttgatcgttttcccaatgcccccgagcctgtttcctgccagtagagcgggtcagatgttgccaacctctgcagagtagcaataagcagtaaacgccacgctctgcacagcctcccagtgctgggcctggtcgccacgcggagccttgggctgggacaggccagacgttggtaacacatcgccaaccagggcaggccccatgagtagacgtgaacgagcccagggccagcccaggctctgaccgtgggtgtgcgtcggggagggggtggggaggagtgggtaggagtcaggaaagtgggtcggccaagacctggagctgctgcataacaatatctggcatttacacaacgaggcctctgctccggacactgttctgaggcttgacccgtccttaagaacctaggacaaccctgtgcggtgggttttatccttaactccattatacaggccagagaactgagccagggtggagatgttccactgagaagaagccacatggctctccgccggctctcaagccaaaaacagttccgaaaatctgggcggggagcgggccagagagcgctggggctctgcccccagcaccccctccacgcagacgactcggtaactgggttgcaggcccgcggctgcggagtgcgcaggcgcgccgagatggccgcgctcctggccgcctagagccggagcggcccgcggagctgcggaggcagccatggtcggggcgctgtgcggctgctggttccgcctgggcggggcccgcccgctcatcccgttgggcccggtgagtctcccgggggagggaggccggccggtggcccaggggagggccgtctttaccccgccccttgccccggcgccccggggcagagtcccgcggaagaagcagacgctggggccgcgaatgtgcatgtgcgcgcgtgtaatgtgtgtgcgcgcgcagggtctgcatatgttcttgggggtctgggtgtatgtgtacgcttgtgtgtctgcatggtgtccgtcagtgggtttctgcgcgcttatatttttggggggggggtgtgttcgttgatgtctgcctgcttgtgtcagcgttatgtcttccgagtgtatttctgtgtgcgtgtgattttaagggtatgtgtctacctgtctgcgtgtgtgcatttctgggggtttgtgtgtgtgtgygtgtctgctttcctgtgcatgtgcctttcttgtgtgaatgtgtagtcttacggttgtgtgtatgaccgtgcttgagtatttctgaggatcagcctgtggttttcaaagtgtgcatctccatcagtctctctggcttcctgatgcctgactgtgtgcgtgatgtagagggtaccattacaagggattaattgcacacgggccagtgtgtgtgcaaagaggctgcatgtacatgcagggaatagcttgtgcaaaagaaaagcgtgtgggggcaagactcgtatttgtgcgtgtgtgcacctgtgtgtcattgtcaacgcatattccaatgacctaacccgggcacagtttaccctgccccccgcaaacccccgcaggcggccagctgcaggtccactacaatttcctagtactgcgggcaccctcggttgccaaggcaacagcctaagccccgcccttcccgctttggagaagcgcgggggcgccccgagtgggcagcaaggaaatgtccctcgcgcccggtgggaatctggactaacgcccagttagagacgcgcgtctgaggttrttagtggtctggaagaaaagaggaacgcgctcttcctccactaggtcctggttttccagaaacagcagaaaggcggctgctgctgtggctcacaagccccccgaccccgaagcctggggatgcgggctcaggaaacatccccaaaacatcccggagggatgaataggaaccaagacgggcccccggctcctagttcgggcaggcgcccagttggcactcaataaagatgtgctggcccggcgcggtggctcacgcctgtaatcccagcactctgggaggccgaggcgggtgaaacacgaggccagcagttcgagaacagcctggccaacatggtgaaaccctgtctctactaaaaaatacaaaaattagccgggcgcggtggcgggagcctgtaatcccactattcgggaggctgaggcaggagaattgcttgaacccgggaggcggaggttgcagtgagccgagattgtaccactgcactctagcctgggcgacagagcaagactccgtctcagaaaaataaaaataaaataaagatgtgtttgctggactcctggaaggaagcaggcgtgctcatcctaggcccaagaaatgacagggacagccctgatccagtccacggtattatctaaatctcacaggaagcttaggagggcagccacgaggttatcccattttactgacaaactgaagacacaaggtcaggaagtggcagtctcaaaggcctgtcctgtttgagtcctgggtcctaagggctgtcctctggggtggcagagaccccagaytggaggagtccacgaagcagtcatttggccagaagctgtctgtgtgtaggatggggagtagcaggcggcattcatctctccaacctctacactgtgcttttcatttctgggtgtaccatgctcctccctggccctgcagcccctcactcctcagcattttcctctattacaagacattctctgtgagcctcttcataacagctgggttagaccttagttataatgcgattgtaaaacgcgttctgattttagcagtattaaatgcagtgagattaaaagaaccatttccaaacatgcccttaagtgggaggtccctttgcgcgcagtctttctcctttgatagccctcatcactttttccacctgcaaggctccagttcatccatcatctcccagctccacgggttcctccttggcaaaccgagtgtggcctggtagttagaagcccattcctaggttcaaaccccaattcccccacttgctacttggcactttgggcaagagaatgtacctctctgagcctccatttcctcacctataagagacctataatcacgtctgctccccagcattcttggtggaaaagaaccttgtatgtgaagtgccacactcagggcctgctgtcataagcgcttgatgaacggaagtggtttcagctgatgccatgatggtggcggtcactgagcatgctgtgtgccagagaacacctcagatgcacctcctcacactgtgaggtatctgagcgcttgccctggcatgtggagtagttgagtgtgaactcccagaactttgcccagagcaagggaaagggcaagggctggagctcttcctctgctggggactctgggtggggttttgggatgggatccagggtccttgtagggactcagttccagcctcttttccctctcctctccytctccagactgtggtacagacctccatgagccggtcccaggtagcyctgctgggcctgagtctgctgctcatgctcctactgtatgtggggctgccaggcccccctgagcagacttcctgsctctggggagaccccaatgtcacagtcctggctggtctcacccctggcaactcgcccatcttttaccgcgaggtgctcccactcaaccaggcacacaggtaggtgctgctccaagggtctagtggagggactaggctcaaggggagtccctgtgtgggacccccattatactcagggtgctcaggtcctgggagggcaatgggagaagcctaggaataaagaaaggtgggctacaccaggttcccagcawacacattcccctgtstgcctgcagggtggaggtggtgctgcttcatggaaaggcctttaactctcacacrtgggagcagctgggcacactgcagctactgtcacagaggggctaccgggccgtggcccttgaccttccaggtgagcacccccacccctttgtctagggaagccttaagtgtggctgggaggcaactggaccctagkgtctggacaggccgtggcaggtcacaacataaggtggcaccatgaaaaagtctgtgttttcattttctactatgaaaactacagtgtgaattctaggtcatggagcaaataaaaactcttcacaagcagtatactttctttttttttattttatttatatatattttttgaaacagagtctcgctctgtcacccaggctagagtacaatggcacaatctcggctcactgcaacctccgcctcccgggttcaagcaattctcctgcctccgcttccccagtagctgagattacaggtgactgccaccacgcctggctaatttttgtatttttagtggagatagggtttcaccatgctggccaggctggtcctgaactcccgacctcaggtgattcgcctgcctcggcctccccaagtgctgggattacaggtgtgagccactgcgcccggccaagcagtgtactttctatggcaaaccatataggttttgtgtttttaagtacacaaatgatttatgctatcattcttgtcattaaaaaaatgaaaaaatgtcgagtcatagaggattaaaaaatactaaaaaatagcaaagctctgagagactggtgccgcatttctctccctctctaagaagtttaggggatgccacacgctgttctgggtattcccacatgtaaagatgcagacgatgtagaggattgtctagtgggggctgtaaacatgattggtatcctgtctgcttagcacatccatctgtagcttggttttctccccctacatcatgtctcaaggatcatgccggtccctacaaacctccctctttgttgtcaaccctgcagtgtgtcccataggagggatggacaggctttattcagccattcctctactggcggagtgctcaagcaatatagtagctaaagcatccttgggcatgcttctttgagcatgtgagcaataatttctctagggtagctactgaggacaattgatgggccaaaggatgtgttgtgttttgttttttttttktttgtttctttttttgttttttgttttttttttttttgagacagagcctcgctctgtcaccctggctggagtgcagtggctcgtactcggctcactgcaacctccgccttctgggttcaagcgattctcctgcctcagtctcctgagtagctgggattacaggtgcgccccaccatgcctggctaatttttgtatttttagtagagacagggtttcaccatgttggtcaggctggtctcaaactcctgacctcatgatccgccacctcggcctcccaaagtgctgggattacaggcatgagccaccgcgcccagctgccaggacatgcatttttaaatttagataactactatctcaccctccaaaaacactatatggatttatcttcccatctgtcatgtatgaaagtgcccatttccccatgtctcccccaacactgggtattatttattttttattttattttattttttttttagacagagtctcgcagtcgcccaggctagagtgcagtggcatgatctcggctcactgcaggctccgccccccggggttcatgccattctcctgcctcagcctcctgcgtagctgggactacaggtgcccgccacctcgcctggctaattttttgtatttttagtagagacggagtttcaccgtgttagccaggatggtctcgatctcctaacctcgtgatctgcccgcctcggcctcccaaagtgctgggattacaggcgtgagccaccactctcggccaagatatgcttttctaacaggcatattacattaccagaaaatagcttctgggcagttttaggtagtgtgtgccagtgccagtggtccccaactttttcccccactgtggtgggcaggaagtcctgtgccccttcccagtgcccctcagctggtacctgctgctgttcctaggttttgggaactcggcaccttcaaaggaggcaagcacagaggcagggcgggcagcgctgctggagcgggcgctgcgggacctggaggtacagaatgccgtgttggtgagcccctcgctgagtggccactatgccctgcccttcctgatgcgaggccaccaccagctacatggatttgtgcccatcgcacccacctccacccagaactacacccaggagcaattytgggctgtgaaggtactgggagaaggatctcaaaggtcctggcaccctgtctgtggcttgggggggttcaggactcaagtcttacttggagggacatggccttatccctgaccttggatggaagagttggatggtgttggggaaggcttcctaggaagtggcttgggggtcagaaactcatcaggccccaagatcacagccccctgccttgccctgcagactccaacccttatcctgtatggagagctggaccacatccyggctsgagagtcackgcggcagctccgccacctgcccaaccactctgtggtgaagctacgcaatgcaggccatgcctgttacctccacaagccgcaagacttccaccttgtcctgcttgccttccttgaccatctaccttgaactaacccactcccagctcccagcctggcatgagcttggacagtctggaccgccaccctccctgaaccagggagacagcctctgggattggaggccagaggccagggtcagacccagccaggactcctcatttcatctcacagacacaataaaaaagcatatttgtcctgcctgggaagtgacaggttccgtttcctggtgtgctgtgggaaagacgggagtgggaggcaagtctgggactactttgggcctgggagctggaggggatgtccagcagtctgagaaggctaagaatgcgccacttcctaagtgcctggcctcaccactctgtgcctgagtttccttatctgtaaaacgggtatgatggcaacacctaggttggagggtggttataggactgaatgagtctggataactgagtacttggccacataaggctggggaattgctggtgggaggcggggtgtattactgctgctgcatgaccacagggattggtgggaaatccagggtctggacagccaagccaaggaagtcaggaacctagagggtatggggaacgcgatttaacaattagccagcattggccgggcgcagtggctcacacctgtaatcccagcactttgggaggccgaggcaggcggatcacgaggtcaggagatcgagaccatcctgactaacacggtgaaaacccgtctctactaaaaatacaaaaaattagccgagcgtggtggcgggtgactttagtcccagctactcagtaggctgaggcaggagaatggtgtgaacccgggaggcggagcttgcagtgagccaagaccgagatcacaccactgcactccaccctgggtgacaaagcgagtgagactccgtctcaaaaaaaaaaaaaaaaaaaaaaaaaaaaaaaaaaaaaaaaaaaaccagcattagctgggcactgtggctcacatctgtaatcccagcaccttgggaggccaaggcgggtggatcacctgaggtcaggagttcaagaccaccctggccaacatgacaaaccctgtctctactaaaaatacaaaaattagcccagcgtggtggcacgcacctgtaatcccagctactctggaggctgaggcaggagaatcacttgaacccaggaggcggagttttcagcgagccgagaaggagccactgcactccagcctgggcagcagagtgagactccatctcaaaaaaataaatagctaaataattagccagcattgttatgagttaaagtctatttgcccgcatgaataaataggtaaataattagccagcattgttgtgagttaaaatctatttgcccgcatgacagagtgagactctgtatcaaaaaaataactaaataaagaattatccagcattgttatgagttaaagtccatttgcccccatgttatgtgtgagcagccaagacttaaacctcaggaaaggtgggacagaacccttcccacagcgtgcctccttggcctagagattgaagtctttgtccctcacccttccccaagctgactcagcccctggagcagagggcagacctggctgggagtacaaagggcagctggggcacaagtgggcaactgcagctgtggcctgcagggggccagtggtacacctgtgcctgtttagcctccccctctggtggctgcagaagagccagtttcctcacactgtccatccagggtcacaattacatccattcacagtgacttcatcacacccacccaccatctcacactgtcacatacacaatcatatccactgatagactgcacacgcagtggcacgcttaaaccgtcacacgtgctcttgtccatgcattcattcccattctaggcactgtccgggctcggcacggccccgggcagaaccttgcaggaagtggagctcacagcctcctggagttcagtgtgggcagacagacattggccaataacttcagtacaagtggagctgaggcgtcagggaggacctccccgaggggctgaggcctgcagtggggagccgttggagacttgccgaggagggcgagggcgcaggcccagggctttgcagctctgcatcttgagagcctcggggcggccccctttcctcccgccctatccgggggctgaaggaggaggcgcccttaggggacgggaccgtcctgagctcccggcgcatacctgggggcaggagtggcaggcgtgtcgtgtggggcggggcgagcctgtcagagcagggccagcccggagctcgcaactcgcggggcggcgctggccgcggcggccgctgcccggggacgggatccggatctaatcctccagtaatctcgctgaggcccgaaccagaggcgggcggggacatccgcgccgacgcggccgctggcgccgggacggccctcactgacggtcttcggtctccgccccgacatccggcctcggccacgtggtgggcggaccggggcggtcctgagcctgcgacctcgcaggcgacctcgctggaccctaagtccaggccacagtcagggaagggcgctgagaggcgagcgtgagcccagcgacaggagagtgaggtgggggccctggggagggatagagggactggggctccgtggcttgaaagccgggcaactgggaggcgttggggtttttcttgtttgttttttgtttttgtttttgcctttttttttttttaggagggcggggggagtacaagtctgggttcaaaccttgctcagctactctatgagctgtccttgaacctctctgagcctctcagctttctcctctgtaaagtgggcattctgagcacaaacttcatggggctcttttggggattaaataaggaaatgtgctggaagcagacagcccagcgcctgaaacagaatgggtgctccttaatgggggctccgaaacacggtatcctacccctgtgggaagtccgggagccgccgtggggacaggctgtgtgcaggagctcaccatttccagggtcttggaggggtagttagccattcactttgcccccagctcaccacgcgcagcgccatgaccagcaagggtcccgaggaggagcacccatcggtgacgctcttccgccagtacctgcgtatccgcactgtccagcccaagcctgactatggtgagaagacggtggttccagagcctgtgacggggcctaagggacggggactgtgctctaaaccagcctccaacccctgtcacccagctgagccccactctgctgtcccaaatggctccccaacccctccagccattccccaagtaaatagactgaggcagcccctccaggttagggaggaaccctttccccagagactctgctgctgaccaaggttactcctggcagctggttaaagaaaaacttcacctcactctccagggcaggagtggtgggggaagcctgaggcagccacagggaaaggagaggccctccagaagcccactggggctggacaaaggccacagcccttagggagtcaagcttggtggctagggcctgggaggtggctcctgcctgttatcccagcacttcaggaggttgaggctggcagattgcttgggcccaggagttcaagactagcttgagcaacatggcaagactctgtctctacagaaaaaatacaaaaattagtcaggaatggtggcacacctgtagtcccagctactccagaggttgaggtgggaggatcgcttgagcctgggaggttgaggctgcagtgagccgagatcgcaccacttcactcctgccttggtgacagagtgagaccctgtctcaaaaaaaaaaaaaaaaaaaggaaaagaaaaaaaaaaaacttagtggctgggaattgtgtacatgggtccaaattcctcctctgtgattaatcagctgagagatggtgggtgaatctcttcatgtctctgtgccatagtttcccatatttaaggaagataacaccttcctccaaccctgtgtccagacatccccctggacttccagaaagggtcactgagtagccaaaaatatcttctttcttggggatggaaatgcaagcatctctgagggatatggagtgtgtcggggaggcagcagcccatttctgggtatgctccactctccgggctgcctgggctggtgggaagctgtgggtaggcagaagcagccccaagacactctgtgcctccaggagctgctgtggctttctttgaggagacagcccgccagctgggcctgggctgtcagaaagtagaggtgagcctggggccctaagcggggaagggaggtgggcctgggcacttcctcaccctgctcagaccacctaccctcctgaccatctccaggtggcacctggctatgtggtgaccgtgttgacctggccaggcaccaaccctacactctcctccatcttgctcaactcccacacggatgtggtgcctgtcttcaaggtgtgtaaggggctggggaggtgggcagtgcaggccttggggacagacatgatgcagaccccaggattcaacctcaagttgctcatggtcctggccccagtcctgacactaactctcaacatccttatgacattacaccactcaagcagccttcatccagcagcaagttctgggccagagtggggtggggactggggggtgggaagcaggagacagcaatgggggatggcaatcagctgccttcttcagcccccgtctttcctctcccaccactccacctgtcactccaaccctatggtgggctcctagggcagggccactgttgaccagagtggattaatggctaaatttggggtttgggcccctcttcccatccctgcccccaggaacattggagtcacgacccctttgaggccttcaaggattctgagggctacatctatgccaggggtgcccaggacatgaagtgcgtcagcatccagtgagtgtcctccattcctactcctccacaatgtccccactggtccagtggattgaagcaggacctgagggggtgattggagaaactcaaggccaaggaacaccgtgacctcttggacaggaactactgccatgaccattgcatggatagggagattcagaccagagaggggcagggactttctggagtccctatcagggtgtggcagggtaaagtccaggacacaggactccagcctgctggccctgcctgtggggccagcctgcgcatctggtggctcccccagcacctggcttatgccccctcaggtacctggaagctgtgaggaggctgaaggtggagggccaccggttccccagaaccatccacatgacctttgtgcctggtaggagtggctcagatacctttgggaaaggggagggtggggcggggcagcctcctcatctcacgtccctgctgcttttacagatgaggaggttgggggtcaccaaggcatggagctgttcgtgcagcggcctgagttccacgccctgagggcaggctttgccctggatgagggtgagcaggttggcaagccaatgagcagccaggcagggagtaggaggctgctagtggggactgagctgctccaccctctgaaccccctttccctcctcaggcatagccaatcccactgatgccttcactgtcttttatagtgagcggagtccctggtgtaagtatgagcttggagggagggctcactctacaggcgggaggctaggccagaaagggcacggtcctatgcagggttgcacagcaaagttgaggcctgagaaggccttgaacccagggcctctacctcccagctctttcctatctgagcttctctgagggcaagccctgaatgggcagaaaccagctgtatgctacgggccctgagtggggacaggaccctgccagaggagcctggaatgagggggagacctgggcccaccccaggctgattgtgtctccagcccctcaggctgaagacactgccttccccctacacctccccaggggtgcgggttaccagcactgggaggccaggccatgcctcacgcttcatggaggacacagcagcagagaagctggtacgtggcaccccaggagggagtctgggagttcaggaggctctatcctgaggccactgtcccatttaacctcatattctcatagcacaaggttgtaaactccatcctggcattccgggagaaggaatggcag

SEQ ID NO: 96130 - DNA, 26906 bp, Homo sapiens
  misc_feature (1)...(26906): n = A,T,C or G
aactaagtatggtggccactcaaataggaactgtggccctttcttgctaggcacagacatggctggatggtactgaatgggtgtgctgtgtcaaggggcacagagcagtgtggggtagtggggaagtgctaacagccaggctcagtttcctcatctgtgaaatggagatggtaacatgtccccaggaaaaggaaaattcttgctccacgagtgtccttgtgttagtacttcagagacagccctgtccatagactttattatttggaagggggaagaggaggtccttggcactggttgggatggaagccccaggggcaaaggtttaggagttccagggstcagctgtcactgggcagggcaggcacactggcaagggcaggcagcaggcgtgtatatatgtccaccccacggaggaacacagcctcatgcagccgttcatcgtggtcgtgcagcagcacaggtgtgcggttcatgggtgagaagcctagagctgggacccccacctgcaggggtgaggaagagccgttagggaaaagccagcactcaggcccagtccactgcccaggcactatatgcaagtggctcaccgcgcggatatagcggttgtcagtggcagcaggcatgatctcaggctccagagtgaggttcctgtaggagaaagagcctgatgaatggggagggagaaagcgaagaattgaaggggcaaaggaaggtgggaaagaggtgggagaaggagggagaagggagggggcagcaggaaggagaggagtagggggctgggctgtgaggagagctggccagcgtgctcacatatccttgcagacccggctaaaagctgcccaccaagggtttgagtcatcagtaggtgtcacttgggggtgcatccacttctgagggacaggaagaatggcaggatcaggacatgggcctgggcatcttgccctatttcccatagagtgggctgtgcctagtacataacacctccccacccccactccttcacctacccagacatctgggtagccagtccagccacaggtcctctttcagcccctcaaatgtcctaggtctgggaccttcccaccctccgtctacttacctcctgtccatccttcagatcctagcccaagtgccccttcctcaagatggctcccccagacctctcagactagttggatactccagttacaggttttcagagtgcaaggggccaccctttcctgtaccacatgggttatatgaaagtacggctgggcgcagtggctcatgcctgtaatcccagcattttgcgaggccaaggtgggtggatcacttgaggccaggagttcgagacaagcctggccaacatggtgaaacactgtctctactaaaaatgcaaaaattagctgggcgtggtggcaggtgcctgtaatcccaactactctggaggctgaggcacaagaattgcttgaacccgggaggcggaggtgagccgagattgtgccactgcactgcagcctgggtgacggagtgagattctctcagaaaaaagtaatatcacataaatgtttgatttatatctccccgtttcaccatacaagggcatgaactgtgcctaattttactccccacagcattccccagcacccacagtggcctctacaatgaatgcttgttggaataaaatgtgtctgtcacagataaagaaatgcccagacatatgcagacacaccaagcacacactccactgttgcacacttgggtctcccccggctcccacactctcccatcacatgtcccaagtccatacctgagcaaactctagggtgaccccctcgccagctgcctggcaccagctctgcagctgctcctcaaaagcctaagagaagggagacgagctgatccttcaggctttccagaggcctctaggacaagactgaggacccaggatccctcctccaaacccaggtggaggtggcaccttgaagtccacatccggtgccacacggaagtcaaagctggcgctcatggtggcaggtatcacgttataggccacgccaccctctagcttagtcaggttcacggaggtcacggacccctctttcaggtgggggtttgactgcagcctgtggtgygggggcagggtagcggcagcaacagataaaagaggtggctcagactctatcctctgtggtaccgcctcccagagccaccccactgcctcccaggctgcctcacctctgccattccttctcccggaatgccaggatggagtttacaaccttgtgctatgagaatatgaggttaaatgggacagtggcctcaggatagagcctcctgaactcccagactccctccyggggtgccacgtaccagcttctctgctgctgtgtcctccatgaagcgtgaggcatggcctggcctcccagtgctggtaacccgcacccctggggaggtgtagggggaaggcagtgtcttcagcctgaggggctggagacacaatcagcctggggtgggcccaggtctccccctcattccaggctcctctggcagggtcctgtccccactcagggcccgtagcatacagctggtttctgcccattcagggcttgccctcagagaagctcagataggaaagagctgggaggtagaggccctgggttcaaggccttctcaggcctcaactttgctgtgcaaccctgcataggaccgtgccctttctggcctagcctcccgcctgtagagtgagccctccctccaagctcatacttacaccagggactccgctcactataaaagacagtgaaggcatcagtgggaytggctatgcctgaggagggaaagggggttcagagggtggagcagctcagtccccactagcagcctcctactccctgcctggctgctcattggcttgccaacctgctcaccctcatccagggcaaagcctgccctcagggcgtggaactcaggccgctgcacgaacagctccatgccttggtgacccccaacctcctcatctgtaaaagcagcagggacrtgagatgaggaggctgccccgccccaccctcccctttcccaaaggtatctgagccactcctaccaggcacaaaggtcatgtggatggttctggggaaccggtggccctccaccttcagcctcctcacagcttccaggtacctgagggggcataagccaggtgctgggggagccaccagatgcgcaggctggccccacaggcagggccagcaggctggagtcctgtgtcctggactttaccctgccacaccctgatagggactccagaaagtccctgcccctctctggtctgaatctccctatccatgcaatggtcatggcagtagttcctgtccaagaggtcacggtrttccttggccttgagtttctccaatcaccccctcaggtcctgcttcaatccactggaccagtggggacattgtggaggagtaggaatggaggacactcactggatgctgacgcacttcatgtcctgggcacccctggcatagatgtagccctcagaatccttgaaggcctcaaaggggtcgtgactccaatgttcctgggggcagggatgggaagaggggcccaaaccccaaatttagccattaatccactctggtcaacagtggccctgccctaggagcccaccatagggttggagtgacaggtggagtggtgggagaggaaagacgggggctgaagaaggcagctgattgccatcccccattgctgtctcctgcttcccaccccccagtccccaccccactctggcccagaacttgctgctggatgaaggctgcttgagtggtgtaatgtcataaggatgttgagagttagtgtcaggactggggccaggaccatgagcaacttgaggttgaatcctggggtctgcatcatgtctgtccccaaggcctgcactgcccacctccccagccccttacacaccttgaagacaggcaccacatccgtgtgggagttgagcaagatggaggagagtgtagggttggtgcctggccaggtcaacacggtcaccacatagccaggtgccacctggagatggtcaggagggtaggtggtctgagcagggtgaggaagtgcccaggcccacctcccttccccgcttagggccccaggctcacctctactttctgacagcccaggcccagctggcgggctgtctcctcaaagaaagccacagcagctcctggaggcacagagtgtcttggggctgcttctgcctacccacagcttcccaccagcccaggcagcccggagagtggagcatacccagaaatgggctgctgcctccccgacacactccatatccctcagagatgcttgcatttccatccccaagaaagaagatatttttggctactcagtgaccctttctggaagtccagggggatgtctggacacagggttggaggaaggtgttatcttccttaaatatgggaaactatggcacagagacatgaagagattcacccaccatctctcagctgattaatcacagaggaggaatttggacccatgtacacaattcccagccactaagttttttttttttcttttcctttttttttttttttttttgagacagggtctcactctgtcaccaaggcaggagtgaagtggtgcgatctcggctcactgcagcctcaacctcccaggctcaagcgatcctcccacctcaacctctggagtagctgggactacaggtgtgccaccattcctgactaatttttgtattttttctgtagagacagagtcttgccatgttgctcaagctagtcttgaactcctgggcccaagcaatctgccagcctcaacctcctgaagtgctgggataacaggcaggagccacctcccaggccctagccaccaagcttgactccctaagggctgtggcctttgtccagccccagtgggcttctggagggcctctcctttccctgtggctgcctcaggcttcccccaccactcctgccctggagagtgaggtgaagtttttctttaaccagctgccaggagtaaccttggtcagcagcagagtctctggggaaagggttcctccctaacctggaggggctgcctcagtctatttacttggggaatggctggaggggttggggagccatttgggacagcagagtggggctcagctgggtgacaggggttggaggctggtttagagcacagtccccgtcccttaggccccgtcacaggctctggaaccaccgtcttctcaccatagtcaggcttgggctggacagtscggatacgcaggtactggcggaagagcgtcaccgatgggtgctcctcctcgggacccttgctggtcatggcgctgcgcgtggtgagctgggggcaaagtgaatggctaactacccctccaagaccctggaaatggtgagctcctgcacacagcctgtccccacggcggctcccggacttcccacaggggtaggataccgtgtttcggagcccccattaaggagcacccattctgtttcaggcgctgggctgtctgcttccagcacatttccttatttaatccccaaaagagccccatgaagtttgtgctcagaatgcccactttacagaggagaaagctgagaggctcagagaggttcaaggacagctcatagagtagctgagcaaggtttgaacccagacttgtactccccccgccctcctaaaaaaaaaaaaaggcaaaaacaaaaacaaaaaacaaacaagaaaaaccccaacgcctcccagttgcccggctttcaagccacggagccccagtccctctatccctccccagggcccccacctcactctcctgtcgctgggctcacgctcgcctctcagcgcccttccctgactgtggcctggacttagggtccagcgaggtcgcctgcgaggtcgcaggctcaggaccgccccggtccgcccaccacgtggccgaggccggatgtcggggcggagaccgaagaccgtcagtgagggccgtcccggcgccagcggccgcgtcggcgcggatgtccccgcccgcctctggttcgggcctcagcgagattactggaggattagatccggatcccgtccccgggcagcggccgccgcggccagcgccgccccgcgagttgcgagctccgggctggccctgctctgacaggctcgccccgccccacacgacacgcctgccactcctgcccccaggtatgcgccgggagctcaggacggtcccgtcccctaagggcgcctcctccttcagcccccggatagggcgggaggaaagggggccgccccgaggctctcaagatgcagagctgcaaagccctgggcctgcgccctcgccctcctcggcaagtctccaacggctccccactgcaggcctcagcccctcggggaggtcctccctgacgcctcagctccacttgtactgaagttattggccaatgtctgtctgcccacactgaactccaggaggctgtgagctccacttcctgcaaggttctgcccggggccgtgccgagcccggacagtgcctagaatgggaatgaatgcatggacaagagcacgtgtgacggtttaagcgtgccactgcgtgtgcagtctatcagtggatatgattgtgtatgtgacagtgtgagatggtgggtgggtgtgatgaagtcactgtgaatggatgtaattgtgaccctggatggacagtgtgaggaaactggctcttctgcagccaccagagggggaggctaaacaggcacaggtgtaccactggccccctgcaggccacagctgcagttgcccacttgtgccccagctgccctttgtactcccagccaggtctgccctctgctccaggggctgagtcagcttggggaagggtgagggacaaagacttcaatctctaggccaaggaggcacgctgtgggaagggttctgtcccacctttcctgaggtttaagtcttggctgctcacacataacatgggggcaaatggactttaactcataacaatgctggataattctttatttagttatttttttgatacagagtctcactctgtcatgcgggcaaatagattttaactcayaacaatgctggctaattatttacctatttattcatgcgggcaaatagactttaactcataacaatgctggctaattatttagctatttatttttttgagatggagtctcactctgctgcccaggctggagtgcagtggctccttctcggctcgctgaaaactccgcctcctgggttcaagtgattctcctgcctcagcctccagagtagctgggattacaggtgcgtgccaccacgctgggctaatttttgtatttttagtagagacagggtttgtcatgttggccagggtggtcttgaactcctgacctcaggtgatccacccgccttggcctcccaaggtgctgggattacagatgtgagccacagtgcccagctaatgctggttttttttttttttttttttttttttttttttttttttttttttgagacggagtctcactcgctttgtcacccagggtggagtgcagtggtgtgatctcggtcttggctcactgcaagctccgcctcccgggttcacaccattctcctgcctcagcctactgagtagctgggactaaagtcacccgccaccacgctcggctaattttttgtatttttagtagagacgggttttcaccgtgttagtcaggatggtctcgatctcctgacctcgtgatccgcctgcctcggcctcccaaagtgctgggattacaggtgtgagccactgcgcccggccaatgctggctaattgttaaatcgcgttccccataccctctaggttcctgacttccttggcttggctgtccagaccctggatttcccaccaatccctgtggtcatgcagcagcagtaatacaccccgcctcccaccagcaattccccagccttatgtggccaagtactcagttatccagactcattcagtcctataaccaccctccaacctaggtgttgccatcatacccgttttacagataaggaaactcaggcacagagtggtgaggccaggcacttaggaagtggcgcattcttagccttctcagactgctggacatcccctccagctcccaggcccaaagtagtcccagacttgcctcccactcccgtctttcccacagcacaccaggaaacggaacctgtcacttcccaggcaggacaaatatgcttttttattgtgtctgtgagatgaaatgaggagtcctggctgggtctgaccctggcctctggcctccaatcccagaggctgtctccctggttcagggagggtggcggtccagactgtccaagctcatgccaggctgggagctgggagtgggttagttcaaggtagatggtcaaggaaggcaagcaggacaaggtggaagtcttgcggcttgtggaggtaacaggcatggcctgcattgcgtagcttcaccacagagtggttgggcaggtggcggagctgccgcmgtgactctcsagccrggatgtggtccagctctccatacaggataagggttggagtctgcagggcaaggcagggggctgtgatcttggggcctgatgagtttctgacccccaagccacttcctaggaagccttccccaacaccatccaactcttccatccaaggtcagggataaggccatgtccctccaagtaagacttgagtcctgaacccccccaagccacagacagggtgccaggacctttgagatccttctcccagtaccttcacagcccaraattgctcctgggtgtagttctgggtggaggtgggtgcgatgggcacaaatccatgtagctggtggtggcctcgcatcaggaagggcagggcatagtggccactcagcgaggggctcaccaacacggcattctgtacctccaggtcccgcagcgcccgctccagcagcgctgcccgccctgcctctgtgcttgcctcctttgaaggtgccgagttcccaaaacctaggaacagcagcaggtaccagctgaggggcactgggaaggggcacaggacttcctgcccaccacagtgggggaaaaagttggggaccactggcactggcacacactacctaaaactgcccagaagctattttctggtaatgtaatatgcctgttagaaaagcatatcttggccgagagtggtggctcacgcctgtaatcccagcactttgggaggccgaggcgggcagatcacgaggttaggagatcgagaccatcctggctaacacggtgaaactccgtctctactaaaaatacaaaaaattagccaggcgaggtggcgggcacctgtagtcccagctacgcaggaggctgaggcaggagaatggcatgaaccccggggggcggagcctgcagtgagccgagatcatgccactgcactctagcctgggcgactgcgagactctgtctaaaaaaaaaataaaataaaataaaaaataaataatacccagtgttgggggagacatggggaaatgggcactttcatacatgacagatgggaagataaatccatatagtgtttttggagggtgagatagtagttatctaaatttaaaaatgcatgtcctggcagctgggcgcggtggctcatgcctgtaatcccagcactttgggaggccgaggtggcggatcatgaggtcaggagtttgagaccagcctgaccaacatggtgaaaccctgtctctactaaaaatacaaaaattagccaggcatggtggggcgcacctgtaatcccagctactcaggagactgaggcaggagaatcgcttgaacccagaaggcggaggttgcagtgagccgagtacgagccactgcactccagccagggtgacagagcgaggctctgtctcaaaaaaaaaaaaaacaaaaaacaaaaaaagaaacaaamaaaaaaaaaacaaaacacaacacatcctttggcccatcaattgtcctcagtagctaccctagagaaattattgctcacatgctcaaagaagcatgcccaaggatgctttagctactatattgcttgagcactccgccagtagaggaatggctgaataaagcctgtccatccctcctatgggacacactgcagggttgacaacaaagagggaggtttgtagggaccggcatgatccttgagacatgatgtagggggagaaaaccaagctacagatggatgtgctaagcagacaggataccaatcatgtttacagcccccactagacaatcctctacatcgtctgcatctttacatgtgggaatacccagaacagcgtgtggcatcccctaaacttcttagagagggagagaaatgcggcaccagtctctcagagctttgctattttttagtattttttaatcctctatgactcgacattttttcatttttttaatgacaagaatgatagcataaatcatttgtgtacttaaaaacacaaaacctatatggtttgccatagaaagtacactgcttggccgggcgcagtggctcacacctgtaatcccagcacttggggaggccgaggcaggcgaatcacctgaggtcgggagttcaggaccagcctggccagcatggtgaaaccctatctccactaaaaatacaaaaattagccaggcgtggtggcagtcacctgtaatctcagctactggggaagcggaggcaggagaattgcttgaacccgggaggcggaggttgcagtgagccgagattgtgccattgtactctagcctgggtgacagagcgagactctgtttcaaaaaatatatataaataaaataaaaaaaaagaaagtatactgcttgtgaagagtttttatttgctccatgacctagaattcacactgtagttttcatagtagaaaatgaaaacacagactttttcatggtgccaccttatgttgtgacctgccacggcctgtccagacmctagggtccagttgcctcccagccacacttaaggcttccctagacaaaggggtgggggtgctcacctggaaggtcaagggccacggcccggtagcccctctgtgacagtagctgcagtgtgcccagctgctcccaygtgtgagagttaaaggcctttccatgaagcagcaccacctccaccctgcaggcasacaggggaatgtgtwtgctgggaacctggtgtagcccacctttctttattcctaggcttctcccattgccctcccaggacctgagcaccctgagtataatgggggtcccacacagggactccccttgagcctagtccctccactagacccttggagcagcacctacctgtgtgcctggttgagtgggagcacctcgcggtaaaagatgggcgagttgccaggggtgagaccagccaggactgtgacattggggtctccccagagscaggaagtctgctcaggggggcctggcagccccacatacagtaggagcatgagcagcagactcaggcccagcagrgctacctgggaccggctcatggaggtctgtaccacagtctggagarggagaggagagggaaaagaggctggaactgagtccctacaaggaccctggatcccatcccaaaaccccacccagagtccccagcagaggaagagctccagcccttgccctttcccttgctctgggcaaagttctgggagttcacactcaactactccacatgccagggcaagcgctcagatacctcacagtgtgaggaggtgcatctgaggtgttctctggcacacagcatgctcagtgaccgccaccatcatggcatcagctgaaaccacttccgttcatcaagcgcttatgacagcaggccctgagtgtggcacttcacatacaaggttcttttccaccaagaatgctggggagcagacgtgattataggtctcttataggtgaggaaatggaggctcagagaggtacattctcttgcccaaagtgccaagtagcaagtgggggaattggggtttgaacctaggaatgggcttctaactaccaggccacactcggtttgccaaggaggaacccgtggagctgggagatgatggatgaactggagccttgcaggtggaaaaagtgatgagggctatcaaaggagaaagactgcgcgcaaagggacctcccacttaagggcatgtttggaaatggttcttttaatctcactgcatttaatactgctaaaatcagaacgcgttttacaatcgcattataactaaggtctaacccagctgttatgaagaggctcacagagaatgtcttgtaatagaggaaaatgctgaggagtgaggggctgcagggccagggaggagcatggtacacccagaaatgaaaagcacagtgtagaggttggagagatgaatgccgcctgctactccccatcctacacacagacagcttctggccaaatgactgcttcgtggactcctccartctggggtctctgccaccccagaggacagcccttaggacccaggactcaaacaggacaggcctttgagactgccacttcctgaccttgtgtcttcagtttgtcagtaaaatgggataacctcgtggctgccctcctaagcttcctgtgagatttagataataccgtggactggatcagggctgtccctgtcatttcttgggcctaggatgagcacgcctgcttccttccaggagtccagcaaacacatctttattttatttttatttttctgagacggagtcttgctctgtcgcccaggctagagtgcagtggtacaatctcggctcactgcaacctccgcctcccgggttcaagcaattctcctgcctcagcctcccgaatagtgggattacaggctcccgccaccgcgcccggctaatttttgtattttttagtagagacagggtttcaccatgttggccaggctgttctcgaactgctggcctcgtgtttcacccgcctcggcctcccagagtgctgggattacaggcgtgagccaccgcgccgggccagcacatctttattgagtgccaactgggcgcctgcccgaactaggagccgggggcccgtcttggttcctattcatccctccgggatgttttggggatgtttcctgagcccgcatccccaggcttcggggtcggggggcttgtgagccacagcagcagccgcctttctgctgtttctggaaaaccaggacctagtggaggaagagcgcgttcctcttttcttccagaccactaayaacctcagacgcgcgtctctaactgggcgttagtccagattcccaccgggcgcgagggacatttccttgctgcccactcggggcgcccccgcgcttctccaaagcgggaagggcggggcttaggctgttgccttggcaaccgagggtgcccgcagtactaggaaattgtagtggacctgcagctggccgcctgcgggggtttgcggggggcagggtaaactgtgcccgggttaggtcattggaatatgcgttgacaatgacacacaggtgcacacacgcacaaatacgagtcttgcccccacacgcttttcttttgcacaagctattccctgcatgtacatgcagcctctttgcacacacactggcccgtgtgcaattaatcccttgtaatggtaccctctacatcacgcacacagtcaggcatcaggaagccagagagactgatggagatgcacactttgaaaaccacaggctgatcctcagaaatactcaagcacggtcatacacacaaccgtaagactacacattcacacaagaaaggcacatgcacaggaaagcagacacrcacacacacacaaacccccagaaatgcacacacgcagacaggtagacacatacccttaaaatcacacgcacacagaaatacactcggaagacataacgctgacacaagcaggcagacatcaacgaacacaccccccccccaaaaatataagcgcgcagaaacccactgacggacaccatgcagacacacaagcgtacacatacacccagacccccaagaacatatgcagaccctgcgcgcgcacacacattacacgcgcgcacatgcacattcgcggccccagcgtctgcttcttccgcgggactctgccccggggcgccggggcaaggggcggggtaaagacggccctcccctgggccaccggccggcctccctcccccgggagactcaccgggcccaacgggatgagcgggcgggccccgcccaggcggaaccagcagccgcacagcgccccgaccatggctgcctccgcagctccgcgggccgctccggctctaggcggccaggagcgcggccatctcggcgcgcctgcgcactccgcagccgcgggcctgcaacccagttaccgagtcgtctgcgtggagggggtgctgggggcagagccccagcgctctctggcccgctccccgcccagattttcggaactgtttttggcttgagagccggcggagagccatgtggcttcttctcagtggaacatctccaccctggctcagttctctggcctgtataatggagttaaggataaaacccaccgcacagggttgtcctaggttcttaaggacgggtcaagcctcagaacagtgtccggagcagaggcctcgttgtgtaaatgccagatattgttatgcagcagctccaggtcttggccgacccactttcctgactcctacccactcctccccaccccctccccgacgcacacccacggtcagagcctgggctggccctgggctcgttcacgtctactcatggsgcctgccctggttggcgatgtgttaccaacgtctggcctgtcccagcccaaggctccgcgtggcgaccaggcccagcactgggaggctgtgcagagcgtggcgtttactgcttattgctactctgcagaggttggcaacatctgacccgctctactggcaggaaacaggctcgggggcattgggaaaacgatcaaggccacttggctggacactggcggagcctcgcactcaaacctgtcgggcctcaactccgtgccaggccaacaagttgccctgggcagttcaagctggggataagggggatggggagcaggaagacagcagcaaggatgcgatcccgaaggaactttcctcctcagactgctccatgtccatgtggggcaggtcgctgaagagttcgaaaccgtgctcagcaccgcgtttggggcatgtgagaccgagaggctttgggaaactgacgccgctgtgagaacgagtttagcggagtctatggacgctgcgagcttgtggccacaagagggcgccccggagcacggcccagtccccgcccccgctggatggggcccggcctcttcccagcgttcctcctccggccccaggtcaccgccagcacgcgcctgcttcccgtctgcgcgagtccacgcagctccccaggtacccgccctgcactcctgaccctttcttctctccagtcaaaatccaaccccacctaccccaagtcttcctttctcggatccctgggtcccctccttgggagttgccaccattccctcccggtgctcccttccagagctagcgagccagaaccgtagtccgcggaagcaacctgaccgcgaggtcaacgcgttgggccccaggtggcagcgcgttgagcaccccgcatccccggcgggtcgcctttcccactgggcgcttcggtttccgcctctagaaaatgggctttccggtgtggaagcgcgcctgtggttccagctactgggggtgagccgggaggatcacttgagcccaggaaggtcaaggctgcagtgatccatgattgcgccactgcactccagcctggacgacagagcgagacatcttctcttaaaaaaaaaaaaaagaaaaaaaaaaaaaccgaagaaaatgggcttttagttccggcgcggtggctcacgcctgtaatcccagcactttgggaggccaaggtgggtggatcacttgaggtcaggagttccggaccagctcggccaacatgatgaaaccccgtttctactaaaaatataaaaattaggccgtgcacggtggctcacgcctgtaatcccagcactttgggaggctgaggcgggcggatcacgaggtcaggagatcgagaccaccctggctaacacggcgaaaccccgtctgtactaaaaaaaaaaaaacaaaaaattagccgggcgtggtggcgcgtgcctgtagtcccagctacccgggaggctgaggcaggagaatggcgtgaacccgggaggcggagcttgcagtgagcggagatgtgccattgcactccagcctgggcgacagagcgagactccgtctcaaaaaaaaaaaaaaaaaaattagccaggcatggtgacgcacgcctgtaaacccagctactcgggaggctgaggcaggagaatcgcttgaacccaggaggtggaggttgcagtgagccgagatcatgccactgcactccattctgggcaacaagagtgaaactctgtcccaaaataaataaatagaataaaataaaataaaatgggctttttaccccaatttgggctccctctggcctgcattgacaactcatgacctgtaacttaccgttgattgagcactgagcccttactacgtgctaggcatggtacatgcatggccttatttaatcctatcaaccacctatgagctagtactattgaattatccccatttatagaaaaggataataacgatgagaataagaacagtaattgtaatggagccccaccacatattgaggttttacagcaggcacccccactgataatttttctgttttttgtttttttgagatggagtttttctcttgttgcccagtctggagtgcaatggcgcgttctcggctcactgcaacctctgcctcctgggtgcaagcaattctactgccttagcttcccaagtagttgggattacaggcgtgtgccaccacagctggctaattttgtattttgagtagagatggggtttctttctgcatgttcatcagggagatctcgaactcctgacctcaggtgatccgcccgcctcggcctcccaaaatgctgggattacaggcgtgtgccaccgcgcctggcctaatgagagttacatgtgaccatcagctggctcttttttttttttttttttgtgaccgagtctcactctgtcacccaggctggagcacagtggcacgatctcggctcactgcaacctctgcctcccgggttcaagcgattctcctgctgagtagctgggactacaggcacgtgccaccacacctggctaatttttttttctttttagtagagacggggttccaccatgttggccagggtggtcttgaactcctgacctcaggtgatccacccgcctcggcctcccaaagtgctgggattacaggcgtgagccaccatgcctggccgataatttttcttaaacttttaattaaattgctaattcttgaagttggctttattgttcccatatttcagatcaagaagctgaggccccaggttacacactaaagtaaatggcagaggcagaaataacacctatgtcctcctgaccccaaggcatgttcttaaagttctggaaacctcctggaggcttccttgctgctcctctgggactgccaccctgggcagggtgttctgtggcccctcatcatcgtggttttgaaccacaggcccttcaccagcacagcagcagcaggcatggcagcaagcgtggagcagcgcgagggcaccatccaggtgcagggccaggccctcttcttccgagaggccctgcccggcagtgggcaggctcgcttctctgtactgctgctgcatggtattcgcttctcctccgagacctggcagaacctgggtacactgcacaggctggcccaggctggctaccgggctgtggccattgacctgccaggtacttaaggggcaggcttctgggcagggtttggggaggtctcattagggacagggccaggttcctataacatgtagcccctccccactccaggggtgggggcggtgggatctggaggacccagccaggctgggccctgaacttgacagcgtttggtcaagcacactgcaagggcctctgagcagtcttgatccagatgtggtcctcaccgcccagctgctcctcactgttacctgggcattgtctcagtgtctctgagcctctgtttcctcatctgcaatgggagataaccacactcatgttttgggctcgctctaatgagaatggaatgagataatccatgtgagtatgtggctagtacctgacacagagtaatcggtgctcagccaattggaagtaaagtattttgactgaataataaccataggcttttggaagccctaaggagtgagacctgagtcttctgggggacaaggcagggcctggtgggtggccaggcccccacttgtgatcccacatgcaaagccctgagctgggttctagggtagatgggatcagtgcccagactgcctgtcataacccagatggctgggtcccaaccctcggtgccaggtgtgaaaggagcagcatggctggccccaccccctcaggccagggatggtatggtttcagggctcaagggcgagcctcctgcccaggcaggattgattccaatggtgggttggcttgagcttcagggtgaaggtctggagctaatcttgttggtgaagcctgaatgactggaggaggagctgcagaaccgacccctcagctgctgtccttcaggagcctctcttgtcccaatccagggccaggtgcctttcacacagttaattttcacaacaatcttaaatggcagatacttttgttatccccctttaacagatggggaaactgagcagctgagagaggactgagggggacctacccaaggtcacatagacaataaatgcagaattgggttctggacccagacttcttgggcttcagagcctgattctctccaggacacttactgstggggagacaggcacagacgtggagagaagtgcctcatgcttggcacgataagatagaatgaggctactgtaggaataaacgtgggcacactgggtgttayaggaacctggccacagagaaactgacctaggagggcttcctggagagagcaaccatctcccttgttttgccattcactgcccttgtcttgtctctttcacacctgaatccctgcaggtctggggcactccaaggaagcagcagcccctgcccctattggggagctggcccctggcagcttcctggcggctgtggtggatgccttggagctgggccccccggttgtgatcagtccatcactgagtggcatgtactccctgcccttcctcacggcccctggctcccagctcccgggctttgtgccagtggcccccatctgcactgacaaaatcaatgctgccaactatgccagtgtgaaggtacccttgtgtgggaagctgaggtgcccctgccaggagcaaggaagggtgcatccctgggctttcctcayctgggggctggataatcaaggggtgtcttctgggaggagctgaccacccaactccacccttttggtttactcagcagactactgtgccaagccctgtgctaaactgtgttctggggcagacaccaatctgtgcccccacccactgggccagcttgtctctctccctcatatggggtggtcccaggaagagactgaagtggggagggctggggatgctatggcaggtccctgttgactctgccccacccccctatccttcctctcagactccagctctgattgtatatggagaccaggaccccatgggtcagaccagctttgagcacctgaagcagctgcccaaccaccgggtgctgatcatgaagggggcggggcacccctgttacctggacaaaccagaggagtggcatacagggctgctggacttcctgcaggggctccagtgaagcccagcactgctgcagggggtgggctgcctgcctgctctgagctctctcttgcacgctctctcttctctcccaggctctggctcatgcacatgcaacaggtgcgtctgtctatatgtctgggttcttgtcttttgtggtctgtttgtcttttctacctctttctcttgcagtgatagactgagggggtaaaatcaagagaaaaaactctcaggaatcaaggaacataatcctgtggagggtaatccattacatgagcttctcctgttcttccactttcctgcctggctttcactccttcccctgctctgcccagcctttccctcccacccactcctccttctgcaaatgccctgaaggccarcccttaccccaacacccacttccccacctccttaggccccagatacatacatgcccacatgcacgcttacatgtttagagccatccttgtttccaaatatgacccttcgcttgagggcaactgcataggtacatctaactctggactggcatgcacattgtcatgtgcagctttgcatatacacacatgcatacatgagcctccacacaagcacttgcacacatgtggactcctaaccatgctaacctcactggctgggaaggtggggaccccatgggccagcccttgcaggaggcccttttgcaaggcttagggtgtggccagccctgaaagctacttggacacaggtttcagctggccccagcccagaagtgacccccagaaagggagggccmccgctttgccccctgcttttacccttccttytgggtgctytacacctcaggttaccaggcctgaggcatytcagccaagcttgtttcctgctytgaggcttgtggggtgggagccagagtggaggtcggtgaaataaagtgatgcaattagaccccaccggctcctgcttctaaagagcgccgcccctcccccacccctgggaccaacactgtgggcccctcccccaccccggcgggaccagatggtccccctgccctttgtccaccaggccagatggagaggaagggagattggattcccctccccacccacacatacccaggtgccaagagactcagctgtggggggaggtggaggtcagtgggaccaggctgagccgattatggaggagtgggggggaaggaatagttgcttccccgagggcggggggtgcccagcggacttgagaacagttcatcacccccactagtatcccttccccagtaaaagactcaacggagcccgttccttgcgaccctatccccaaaaggaattccgggggtagatttggggttatcacaggatcgggtgcacagggccacacggctctcaggcccctcctccagcctgtcctgcgcggacgagggccgggccatgcagctgtgggtggccgaggagagcgggtcttggtgggcgcaagcccgagcggaggatggcgcgcagcgagcagagccgggagctaggcggggcgcagggtcccagccggagctcggagggacgcgggccgggagcgaggcggagccggggctggcggggccaaggcggggatgggggtgcagggggctcggcagaggcgccgggcgggcggcccgggccggaaggactggcctggcgggagcggaggggcttggagccgggcgcagcgcgggcggtgcggggaaggccgtggctggggaccgggcttcaggccggacgcccctacccccaacccgtggggctctgggagtggcaggggaagggtcgcccgagccctccaggaagcggccgccgctcggggcgcaccgcggcgcgcggggcggggcgggcggctgcggcactggggcggctggggcgggcccgccgctctgtaatcggatccggggagggggcggggaggggccgggccgggcgggccggggggtggggggggccannnnnnnnnnnnnnnnnnnngcacagagcagtgtggggtagtgggcaagtgctaacagccaggctcagtttcctcatctgtgaaatggagatggtaacatgtccccaggaaaaggaaaattcttgctccacgagtgtccttgtgttagtacttcagagacagccctgtccatagactttattatttggaagggggaagaggaggtccttggcactggttgggatggaagccccaggggcaaaggtttaggagttccaggggtcagctgtccctgggcagggcaggcacactggcaagggcaggcagcaggcatgtacacatgtccaccccacggaggttcacagcctcaggcagccgttcatcgtggtccgtccagcagcacaggtgtgcggttccatgggtcagcagcctacatcatgcgaccccccatcatgcagtgtacgggcgcgggagccgggctccgggccggccgggctccgcgcctgtcaaacccctcattgttcgcagctgatgtcactcgcagttgtgagcggccgcctctcccggggacaatgtgggactgagcggcccagccgccgtgccgccgccgccgccgccgcaggacagccccagcgaggtagggcgcgggccgggcggggcacggcgggccgcgaagtttgggggttcgcccgggggcagggagcccgcgcccagatccctcggttggggtcgcaggtttgtgagactgcgaggaacacgttctctgtcccacaccgctgaggcctgcacaggtgggaggcgctggtctgccagaggcgcccttggcaccagggaggggcttcctggaccttagatcccagatttgaggcccccatcccactcgctgtttctgtcctttgcgcctgctcctctctctgactcctgccctgggttctggttctgctccatctctgccctcacttgccactcccctgtagctcctggctgggcacacactccttcccatcctccgcagtcgttgggggagccagatacagacctccaggccaggggtgtatggagatgacagctgggggctcagagtggtccctcttgccccatagctcttcagcccttcagctctgacctagcttcttggctggggtcctggggggtgggggtgggaggctctgctactcacttcagcctggccctcatgcctgcctggccaggagagggaggtgcccgcctcctctctcccctatccctggcccgccatcttgagacctgtggcacccagtgccccacccggccccagcacccaggggagtggtctccaaggtgatgatgcacccagggccagttgcattcctttctccccaccaagcccaggatgctcatgttcgtgctgaaccagcaggacatgtgtccccaggggcttgccttccgccacaaaggctcttacaatccatgaactccctaggagctgagctcctgccctccctgttccctgggtcaccctcattgcctcaggaccagtacctgggaccctattctttccccatctgaaaaaatcccctggtcttcccaggtcctggagccccctcaacctccagggcacccccatcccagcccccaccccctagccttcatcagcatgcaggctcaggctgcccaaacacaaggggattgttcttcttgcatgctcagggtggggggctgggagcaggcagcccacacaccctggcaggcccaggccacgaggaggctggcttgccccaccctgtgtccccagacaggctgtccaccctccctactcccatcactgctgcccctccagcctccatcaccattgcccagtggcgctgacatcttgaggaaagagctctgagctgcacaggtagacccctgggttctccagctctgccagttgtctcccatgtagccttacaaacatttcccttcctctctgggccgcgagcccctcttgtgattggtaagacctttccagctgtgacaggctgagcccaactcgactctgtgaaacgtaccccaccccccagcccttcttccagtccccctcttccatgaggagacccactctgctcccaccctctgaaaacctaaagcacagcccaaatcccccaccccagcagcatacctagggagctcctagtcctggtaaaacggcaggagtagggctggggatgctgagaaaggaaccaggaatcctgtccaggcaggtcctacctctgcccatgtggctggccctcatgtctgggtcttctcactctactctcattactcctccgggaccctcagccccatctttggttccaaatgtccccaggccccatgaaccttaactcttctccctgcacactgaccctggtcttgtctcaaatttcctctttctggagctctgtgtatagtggaaagacaggctcagaaatgcccagcggggacttctttgagttgcagcaacatctttgaggggcacagaggcctgagtgatcacatctgacttggaagcctgsggagggcttcacagaggaggtggcgtttgagaaggattttgacagagagtggggaggatgggcgttttgagctgaggtaagcctggagaaaggcccgaagggctggaggtgctaagtgtgttctgcagcctggcatgtgtgaaggatggggtggagatgagacaagagagacaggggctggatcatgaaggtccttgatggcctgtctgtggagttcaggctttattctttggggactgggcagccatgggtggctgttgagcagcagagtaagcatacagttttcagcatggagattggaagctagaggcctttctcaatgtagatgagagagtgaggggatgggtaccatgaggctgtggcctttctcctggagcccagcctgggcccgggcttgacttggtttcccttggttccgaagactcctgggggctgcctaatgatggtgtatggaagctgtagcatttctggcacctgccaacttgtcagagctgcctttcccttcctggcactttgtctatgtggcagatctgaatcaagaagccagaggctggaacttgtggaccccaggatgctcacctgaggcttcccactcccctcctcctctcccaactgtagatgattggctatcccgggaggctgggaggccaagaggctgggcacatgtgtccaagatgctggggcagttcttatgaaggcctggctagttaggagagtgagcatctccagagaagggattgggcaggagagttaggagccctcgatgcagacgtgctgtggcccagggtccacccccaccacaccctgcctccctggatgctccgagccattccccagcatcactgggtgtggctagcatggctgctttgggagtgggaataggagaagggggctgctaggtggggagctgggggtgctgagaggatgtggggggatgtgagatggagagtgaagcccaggtgggtccacaggccctagctggtccagacattctggccagcagagcggagggaatcccccaaggggcgggccagtctacttgaatcgcctggccccaggagccctcccytcccccggattgttcttgctccagaacaaaggcagggtggacacttgatccctgcatgtggggtgagctggctaagcccccagccctttgattgggcagctgtcatgggagagagacagctgggggggaggggcaggaagggggcagccaccatcgcttacacagctgtcacccccccgcctcctccagcctgagtggcagaaagccagggacaggaggagtgggcactggggctggggagggggcctgggagtcaggagggaatgcccgaggtcagaggcctggtgtgagcttggtatgccctgccagggagccctgctgaccagagggggctgggcacccgcggaggtgagctggaggtcactgtggcatgttgtgtggctgccacgtgggtggcccggcaaagacccagggcccacccggctggagcagcaaatgactccctagagccccactgagggcagggggagccagtgatgcctcatggggctgctcgttccttgggccctaggagaataatttggaagacatgggtcagaaccccttgttcttgcctaaagatgggaaagaccttgagagtctctcagaccaggaagggcgcagatagaccagcaactctctccctacccccagcccctaaacacaatacaggtgggtttaggtcaggtgaagacctggccaaagttacccactggacttggggcggtgggtctctgctggagacccaggcatcttttcatggcagaagctctagttctggccatgttccagccctcctgccccatttttcctggagccacaagaggtcatgtggagatggtttggggacaatgtcaggtctcccactggttaccatcccaagggggtccttgaaccccagaaaattttggaacttaagaccgaggctctggacaagttgtcagtcctttccaaataggatccctgtcttctagctaggcaaaggtctcagagacgactgaagcccaatccccactttcgaaggagcccgccctccaggaagaggactaacagatccagacaggagcagcctgaaaggggaggcagatggggctttggatagcctcacactagcaatgctagtcccactgtgtcccacctctctgtgaccttgggcaggttactgatcctctccaggcatcaggttctcctgtgtagtgaattcatctgctcagctaaccagtatgttagctgagttccagctgagctcagtatgttctgagcaccttctctggcctggctctgaactgagccctggggacataaggagaaggcagcagccttggctcctgctccaaggggctcctgggcttggctgtccagagaagcagaaaccaagcacgtcatcacaagtgctttgatgggggaagtgcaggcagctgggggaatgtctagcaagggc

SEQ ID NO: 96131 - DNA, 48910 bp, Homo sapiens
  misc_feature (1)...(48910): n = A,T,C or G
tgctattactgacttaaatggacctttttgcttttacaaactatacttatctatggttctttgttgaagaactcaggagttcgacattaatagaaattagaaaattttataatgtattataaaatccattactaagttgaaagtatgcttttaactctgtgtatcaggggatgtatgtttgtgtggagatgtttttttctgtctgtaggcacatgtatatatcccagtaagttcttattttcatttcatttctacatttttatgaacttgttttataagggtactgtttagttgtgataattaaatatatataaaagctttctgagagattatttactatatgaatatattttcagctggctgatcaaaagtatttttaaaattttgtttttagccattcaaaatgtatttgtattttcagaattgaatgcaagtcatacttagagctcaattaaaatactcttgcaagaaaaagcattaaattctctttgagaattccgtgaaatgcaaattaagggaaaaataggttttaagcagtagcaaaaacacaccgctaaaaatggcctttgaattctcagagctatggaaaaatgtgagaaactaaattgtctcgagatgtcaagatttttctatctccagttgctattggcctgtcctactgttgtctttgaatatttcctgtattccaccccaaaagatttcaacttttagtttttctatcactgggcaaggtcagactgggtttataaaacaatatattggcatattgtgattctttgtaattgactataaattggttttgaaatgtccaaacatacgttgtgtgtctttatattgtactgtgtgttttaagtaactggcagaaaaagaattggaaatgaaatttccaatcagacaatgtagtattaaagaaaactttgttttaaatatgcggtaccatgtaaaattactcgtgttaggaataaagtccactgttgaagttgaatgtcactaagcttattatgttaaaaggaaccagtgtgattaggaaaacctaccagaagccagatacagtgtggtacgtgcaacatttcatgcacattttgattttgtttgtcattcaaaattgtgcttgtaaaaatgtatacaatttctgagttttataatttctaggtacttgttttttcttgctggtaaatagcttttttttaaaaaaaatctaatataaaagaaaccatgtttatattttgttagtgatcaatgactttgtttatatggaaatttgtatattgttggcacacattttgttgaggtttacgtgcatgaaggcctgcaataattagcacaatgaaaactgctttttcttacatgttcatttttttgaaagattgtggtgcaaaggcttactctaataagtaaccttctggactatggaatgaatataaatgaatggcmctttgagtgttaataaagctaatatttatttccactgtgattggtttttccaaatctattcttggacacattttatttacagttattccctccttgcttgagttgagcactctctaggaaaccaagcgcagacaaatctaaaaacaatgaaactaaaccaaatctttccagtatctaagtctataatgttccacccaacttgtagtatatctttggctggacatcttgattacctaaatcagaactaatgattaaaaacaaacacaaaccctactatcaaacctactgagtataaggaatggtctctcacatggtgttggagattatttatttatttatttatttattttgagacagagtcttgctctgtcgcccaggctggagtgcagtggcatgatctcggctcactgcaagctctgcctcccgcgttcaggccattctcctgcctcggtatcctgagtagctgggactacaggcacctgccaccatgcccagctaattttatttgtatttttagtggagacagggtttcaccatattagccaggatggtcttgatctcctgacctcgtgatccatccgccctcggcctcccaaagtgctgggattacaggcgtgagccactgcgcctggcggagataatttaatactttggtatagagggcaacttaacacaacctcagaattgaaacctcagaatcagaatcagaaacctcagaattggccgggcatggtgatcccagcactttgggaggccgaggtgggtggaccacttgaactcaggagtttgagaccagcctgggcaacatggtaaaaccctgtttctacaaataatacaaaaatcagccacgtgtggtggtgcatgcctgtggtcccagctacccaggaggctgaggtgggtgggtcgcttcagcctgggagacagaggttgcagtgagctgagattgcaccactgcactgcagtcttcatgacagaacgagaccctgtcttaaatttcagaaccttgtatatcctctgacccaccaatttatacctaggaattaacctgtggaaatagattgtgaatgttttaagttgtatctataaaagcccaaacttaaaactctaaatgtccaacaataggggctattgtaacaaagtaccacacattaggtggcttataataaaaaatttattgtctcacagttacggaggctagaagtcagaaatcaaggtgtgggcaggaccatgctccttctgacacccataagggaatctttccttgcctcttccaacttatttttatatattagaaattgggtctcactatgttgcccaggttggcctcatacttctgggctcccacctcagcctcccaagtagctgggactacatgtgctccatggcgttgtgtccagctgcctcttccaacttctgatagcatcccttggtttgtggcagcataaatccgatctctgcttccatcagcacgtggtgctttttgtgtgtctattgacacaagtgtgtgtgctcccctttttataaggagaccagttactggattaggcccaccctaatgacctaattttaacttgattacctctataaagaccctgtttccaaataaggccatactctgaggtagtaggggttaggacttcaaaatatctttttgggtcaggcacagtggctcatgcctgtaatcccagcacttggggggccaaggcgatggacaacttaagtccagcagttcaagaccagcctgggcaacatggtgaaaccccgtctgtacaaaaaaatacaaaaagccaggcatggtggcatgcctgtaatctcagctacttgggaggctgaggagggaggatcacttgagcccaggaggttgaggctgcagtgagcccagatcgcaccactgcactccagtctcggcaacagcaagaccccgtctcaaaaaaaataactttttgaggggtgggggacacaattcaacccatagtctgtcctctggcccctacaagttcatatccttcccacatgcaaagtacattcaccccatctcaacatcaacaaaagtcagtcattctagcatcaactcaaagtccagtatcatctaaatatcagttcaaatctcatcacccaaatcatccacatcaattgactctgggttaggtttcctgttggagcaaattttctttctatctatgaacccatgagaacagacaagttatctgcttccaattacaatggtataggcagaggatagacacattccattccaaaagggagaaatgggaaggaaaaagacttggaggtgccaagaaagtctgacacctaacagggccaatgacaggattttaaggcttgagaataatcctcactggcttgatcctctgtcctcagggcccactggggttgcagccccacaccctcagaactgaggaggtggtggccgtgggttcaaacccaagcctgtccctttcagtcctgtggtggcggaagcagcctcactggcctctgaactgcccctgccaatccctttcctacctgtggaatcctggaagtccaacagccttccttcatttcatcccatctatgtaccctagtcaaaactgtccaggtttctgtggagatgggtgattgggtctataagccacacacctaatctcttgcaaataaatggttgtccacatccttagtgtttctccagagcatactttctctctctctcttttttttttttttttttttttttttttttttttttacaatgtgagtataagaatgatccaaatcttcaagttctggttcctttttgttgaataattccaccttcagtgtatctcttctcacatttcactataagcaataaggagaaagcaggcctcagttttttttttttttttttttgagacggagtcttgctctgttgcccaggctggagtgcagtggcgtgatctctgctcactgcaacttctgcctcctgagttcaagagatcctcctgcctcagcctcctgagcagctgagactacaggcgcgcgacaccacgcccagctaatttttgtatttttagtagagacggggattcaccatattggccaggctggtattgaactcctgaccttatgatcccctgcctcggcctcccaaagtgctgggattacaggcgtgagccaccgcgcctggcccaggcctcactttgaaccatcatgtagaaatttcctcagcaaaatgtccaagcttatcacttataagttctactttccacccaacagaatacaattcaggcaagctctctaccacttgcctccagtttcaataacatatttctcctttccatctgagccgtcaccagaatcacctttaatgcccatacttctaccaaggctcttcaagacaatagaggcttttctatcatgcgcctcaaaattctttcagcctctaccgattacccaatttgaaaaccacttccccattgttaggtatttgttacagcagtaccctattccccgtaccaaaaatctgtgttacgttctccagagaaacagaaccaagaggcccactgagcaagcgagattgattgattgattttaaagaattggctcatgcaattgtgggggttggcaagttgggaattcaggtacgagttgatgttgtagttttgagtccaaaggctggaaactcagtcagaactttctgtgttgcagtctggaggcagaattcctttttccttgagaaacctgtctttgctcttaaggccttcaactgatttggatgaggcccacccgcattannnnnnnnnnnnnnnnnnnnnnnnnnnnnnnnnnnnnnnnnnnnnnnnnnnnnnnnnnnnnnnnnnnnnnnnnnnnnnnnnnnnnnnnnnnnnnnnnnnnnnnnnnnnnnnnnnnnnnnnnnnnnnnnnnnnnnnnnnnnnnnnnnnnnnnnnnnnnnnnnnnnnnnnnnnnnnnnnnnnaaaaaaattttttttgagacgaactctcggcctgtcgcccaggctgtagtgcagtggtgcaatctcagctcagtgcagcctttaccttctgggttcaagagattctcccatctcagcctcccaagtagcttagactacaggcgtgtgccaccatgcctggctacttttttttgtatttttcgcagagatggggtttcaccatgttggccaggctggcctcgaactcctgacctcaagtgatccacccacctcagcctcccaaagtgctggaattacaggcgtgagccaccgtgctcagccaaattttttttaattaaaaaaaagaattcttccttacccatggactcaggtcacattctctctctctctctctcacacacacatttattgcccacatggcttcattaaaatttaagttccagaaggatgaggcctttaattcgcgcactacacaggtgctcaacacacagtattttccttcagttgtagagaaatgaacagtggaggacccccgccgctgggtcgcacgagctaacagatcggcggtcgctggctctccgctcttccagccacccacatcacggcgcctagaggcgggacatcctgtgtggacaacagggagcttccggattgagccggaagtycccccagagcggatgccgcggcgggcctgtgggagcggggtcatcttctctctgctgctgtagctgccatgggcaaaagagaccgagcggaccgcggtgagacgttgcgcgggcacgctcagccacgactgcccttgccggccctgccccccgctctgcctcggagctgctccgggcctctgcgccggccgaccctgctggccctcccgcgcgcaccccgttgggacaggcctttgggcgggagagatgctggacctgggcgcagcccagcgaactcggcctaggggagacgggtgaggggcgcaacgcctgcgggatgcaggtggctcttagctaggagtttgcggcggcgcaggtgaaatgctgccaagcggtgcggagggaaccctgaaggctcctgctgggcttacttctgtgttggtatcttgcagacaagaagaaatccaggaagcggcactatgaggatgaagaggatgatgaagaggacgccccggggaacgaccctcaggaagcggttccctcggcggcggggaagcaggtggatgagtcaggcaccaaagtggatgaatatggagccaaggactacaggctgcaaatgccgctgaaggacgaccacacctccaggcccctctgggtggtaagcatgcccttagcttgggcagggcccaggagtgtgcggagcggcagctaaatcttgggcatcctcagagtcaaaactgacattcaggatactgcccctagaactggccgggagagaattttcatccacacacgttggaacagcccaaggcaacagcgagcagttgcgcacacgtgtggcggccggacctgggcttccaacagctctaacccctcggtttactctcactccttccccagccctaccccatgtagtgaatccttttatctgccgaataaatagcatttatcatgtaacagtttgtttcctcaaataatggaagacatgttcggtagcaagcttttgctctactttaaataattaatgttatacatttagttgaaatctagccaaaaggtaacttgaggatagccagtaagatgggctttctctgtgcagaatagtaggaaacagctgttgactttggaaacactttcttctatttttctttactcttctgtatctgattaatgtaacaggccccacagttgtctgaaggagtgcttgcaagaatatctgtggtgttgggcagcttattctttcttgataatgatatgggcaagrgcccagtagtctctgcaactcatgtttccttgtctgttttgtccatttggtatctctcaggctcccgatggccatatcttcttggaagccttctctccagtttacaaatatgcccaagactycttggtggctattgcagagccagtgtgcygaccaacccatgtgcatgagtacaractamctgcctactccttgtatgcagctgtcagcgttgggctgcaaaccagtgacatcaccgagtacctcaggaagctcagcaagactggagtccctgatggaattatgcagtttattaaggcaagtgacagctgagaccagcaattccayctgccctgctaatgtaacaatrggcataggtgctccatgttgtcagcctgtggcagccatgagaatgtgccattcagatttcctgtggggagcataacgactgattaccccagccgctacactctggatccagcattgtgttctgggtgaggccacgcttctcatgagccgctacactctggatccagcattgtgttctgggtgaggccacgcttctcatgagccgctcccagctgtgggtattaacacagaggggctactaattcaggcccattgtagccagggagaatttggaaatgcagcccaaagtgagtgtgctggggactgaattgtgtgtgttcccctcaaattttgtcttcaaaacctaatatccaatggtaatgtatttggagtaagaaagtagttaagactaaatgaggtcgtgatccgctatgattagtgtcctcctaagaagagacaccggagcatgctttctctcacctgcccttcttgtcatgtgagtacacaatgggaaggtggtccatrgacaagagccttcaccagaaactgaatcggctgataccttgatcatagactttcagcctccacagctctgagaaaatacagttctaatgttgaagccacccagtctggaattttattatggcagcccaagctgactaacacaggtggtaaactctgtctaaagctaagtatctgcaggagaccaatagtcaacaagttccatgagggaaagtcaaaaacaacttcagatgtttttgacaaaacaaagagggttccatgtgattaatagttgaacatgctaggtttcttctgcgagatgggtgaatgccatttaaaagagatggacagtggctttcattgcctttggctgatccaaaaggagtcagattcagaccttgggatctggagtggcagaagagtgccacaggaattcagtatggtactgcagccagtcccagagaagctgcaggagtcctggagagaactctcttttcctgtgatgtgaaagcgtgcccggccaggtgcagtggctcactcctgtaatcccagcactttgggtggctgaggtgggtggaccacctggggtcaggagttcaagaccagcctggccaacatggcgaaattcctgtctctactaaaaatacaaaaattcgccaggcatggtggtgggtgcctgtaatcccagctactcaggaggctgaggcaggacaatcacttgaacccgggcggcagaggttgaagtgagctgagatctcaccattcattgcactccagcctgggcaacagagtgagactccgcctcagaacaacaacaaaaaagaaagcgtgcccaaggagaggaccttgtaccaacactgtggctctgcctggtcttggctgcgaattgcctgcagggatgtaggtgttggtgcactgtagtggtggatcagggacaacagcggggataggcagcccctcaaagtctgactggcaaattttttttttctttttttttgagacggagtcttgctctgtcgcccaggctggatagcagtggcatgatcttggctcactgcaacctctacctcccaggctcaagcagttctcctgcctcagcctcccaagtagctgggattataggcgcccgtcaccatgcccggctaatttttatatttttagtagagatggggtttcaccatgttggccaggctggtctcgaactcctgacctcaggtgatccacctggctcggcctcccaaagtgctaggattacaggtgtgagccaccgtgcctggcctgagtggcaaatttttattgttgccacacagcctctactgtattccttcctaaaggtggttgggaacctgggaggatttaagctgtattctctgccatcaagatgcttacattctatttggggaaataggagcattggtgaagaggctttgcattttatttaagccgcaattactgtgcacatactctgtggagttgtagtaatactggtgtggtcttctctagactagggtgggggctgtgggaatagagaggaaaggcagaatgcaagattttaagcagcgttttataacttaatggatatgcatcagaattacccaggcaagaggaagattttgttctcagaaagcagaggccaatggaaaaagctcagtttagrcacatctgaccactttaggattgcaagttgggtttccctaaagtaaaatkaacttttcacttggttggtaggtgtaagatgtgaccagtaatgaatgtgttctgagttagctgcacatttacctgttggatgttatctgtatttgcagttgtgtactgtcagctatggaaaagtcaagctggtcttgaagcacaacaggtaagagattccatgacaggcctgtcccaaggcactgtcactttctgcgcaccagcaggaataaagggatatgggaaggacctgatgtttatgctgtcttttctgtgaagcacagataagagaagagaaacaagagatgtggcccagactggaaactcatccactggccactgtatttcytctagcagtggagctgggctcaggcccctgcctacttgacctcaaagtcacaaccctcatatgttaaatcatggccggcagctcatggtacagatttggcgaagggttgtggggagagtcatgaggcttgtatttccagaccatctaattgaatgagcagtggaatctccaggaggtacctgctggtcagtagaccccttcttcctcccctgcttgcagatacttcgttgaaagttgccaccctgatgtaatccagcatcttctccaggaccccgtgatccgagaatgccgcttaagaaactctgaaggggaggccactgagctcatcacagagactttcacaagcaaatctgccgtatgtggactcctgggccacccttgggtgggggcaggcatttaggatttcagttctctcaggtgtctttaacccagcacttacaacctagcagccctgctggttctaccctttacaacttcacccattgcttgataacagcagaattaaatgttgtgtgcacgttcagcacctacctctctcacagatttctaagactgctgaaagcagtggtgggccctccacttcccgagtgacagatccacagggtaaatctgacatccccatggacctgtttgacttctatgagcaaatggacaaggatgaagaagaagaagaagagacacagacagtgtcttttgaagtcaagcaggttagtgaatgtaccttcctcctggttccttcactgagctgctgttagaagctagtccagccatgtgtcgactctgcctgtagtctgtgtgaaaggaaggagtccctgttggtccctgaattgctttctcctttttattatctgtgagccatggcatcatttctcctgatggagttaaagtcccagtgtcctctttttcaggctggtaggctggtcttcacaggttcctgaggagatgtgagaaatggtgcctgaaggtcaattttgcctgctgmttagatttcattttcaaagtgttgttagtctgggttgcttttctgtgctttatcccggttgttgactgagcaagatctaaaatcttgtakaagtttagatagaatgccacttttttgaccattggacctcttagaagatgtaatgtttytgagcacagtaacaagattttaaaaccccttttgtgccctctttccaggaaatgattgaggaactccagaaacgttgcatccacctggagtaccctctgttggcagaatatgacttccggaatgattctgtcaaccctgatatcaacattgacctaaagcccacagctgtcctcagaccctatcaggagaagagcttgcgaaagatgtttggaaacgggcgtgcacgttcgggggtcattgttcttccctgcggtragtggtaccagagttaagaaggtggtcaggctgttgtgtctggatctgccagctgcctcccgctttctctctgcacatttccctaaatcacaccttgctgaaaagccaagatcaggtgactccctgattcatgacttgacaaatatttgagtgcttgctgtgtatgggccctggcctggacactgggggtattatggtggctagaacaacacttctgacctcatggagctcactcttctggggaagagacagatggtaagcagatgtgtacaaccttgggtggtgctagagtcagcgaagaaaaattagagcacatgaggggtgagattgtaatgatggcaaggggctgttgcacttagtggggttaggttcttgttcttgaatcagccttaggggttgtgtatttggagactccctagcgcagaaactttggtgttcctggatgactaggatggtgtgcaggtccagggaaaggcaggagtggccccctgggcacctgtttgaccacttatcccagtagtgtcaggtcctagcctagcttcttggccagagaccacagcagactcaccttgggaccccactgaggacttacagaggcaaggtcttcagggaaggggaggttctttttttccaaaactccaagggttattttgatgttgttttccttttttatttcactttacaaattttttttatttacgtttattcctggtaactcacagtgtatttttataataaaggaaggatctctgtttaatggaaaagcttgatttttctcttgatcttcaaatggtggatggtagtaaactcagaagctyctggaatttcattttctctgtacacacatagcgcatccctgaattctcagccccgtttgctgtgtaataataatagtggtcttttgccgagtgcctccttctgtgggccaggcatgctgggacccagtagcttcactgtcccgtggctgtgggcaaggtaaagtactcctcagctttagtttttcaatctttcttttttctttttgagacagagtcttgctccgttgcccatgctggagtgtagtggcgccatcttggctcaccacaacctccgcctactgggttcaagatattctcctgcctcagcctcccaagtgaccgggattataggcgcccgccaccatgcccggctaattttttgtatttttagtaaagatagggtttcaccatgttggccaggctggtcttgaactcctgacctcatgtgatctacccacctcggcctcccaaagtgctgggattacaggtatgagccaccgtggcacggtggctcagccaggtttttctatctttaaaataacaataacaggcatttctcttctcactggtttgttttgagattttgacatttaaatgagatgtgtgtaaagtgctacagtaggccccagcgcctgccatttctcacatatgtatgtgaagtgggcatgtctcctcattataaagaagaaaacaggctggagcagtgtgtgtcgctcagatgtcagctatgtggactgttacaagacattttcctagattgctgtacttgtgagtcattctgcctgtccctgtccttcatttcaacctgtccttgggtgggattgcactcttgtttcttgtaggtgctggaaagtccctggttggtgtgactgctgcatgcactgtcagaaaacgctgtctggtgctgggcaactcagctgtttctgtggagcartggaaagcccagttcaagatgtggtccaccattgacgacagccagatctgccggttcacctccgatgccaaggacaagcccatckgctgctccgttgccattagcacctactccatgctgggccacaccaccaaaaggtcctgggaggccgagcgagtcatggagtggctcaagacccaggagtggggcctcatgatcctggatgaagtgcacaccataccaggtaagcaggctggagctgagctgtccacttgctgaacagacaaaccaatttccagttgttaggttgggaaagggactgctgtgtagcccacccaactggctagaaagacttgctggcttgctgggtaaagcttttaatagttcttttttttttttttgagagggagtctcactctgtcacccaagctggagtgcagtggcacgatctcagctcaccacaacttccacctcccaggttcaagcagttctctgcctcagcctctgagtagctgggattacaggcacctgccaccatgctaggctaatttttgtatttttgtagagacagggtttccccatcttggccaggctggtcttgaactcctgacctcgtgatccacccacctcatcctcccaaagtgctgggattacaggcgtgagccaccgtgcccggccagtaattcttaagtgggatgcaggcaggagtgttcacattcacagtttgcttaatcactggctcagtagtgatttagaaaatgatattttctttcctccatcttccttttgctgctcagcttcatccgttttttaatggccctctaaaaactgggttaggagcactgaaaagcccttcccaaaatggtggtgatgtgttttatttgaagcccggaatattgatccttagtcaatatgtaatagaagccctacttctccaagtatcatgggcaaacctttttttttttaagctgctctattgatttaatttatataccataaaatcaccccttgtaaatatataatccaatgagttttagtaaatttgtggaccagtgcaaccatgaccatgatccaagttttcttttctttttttttttgagatggcatcttgctttgttgcccaggctggagtgcagtcgtgtgatcttggcccactgcaacctccgcctcttgggttcaactgattcccctgcctcagcctcccaagtagctgggactacaggtgtgtactaccacacccggctaatttttttttatttgagacagtttcgctcttgttgcccaggctggagtgcagtggtgcaatctcagctcactggaagctctgcctcccgggttcaagtgattctcctgcctcagcctcccgagtagctaggattacaggtgtgcgccaccatgcccagctaattttawatttttagtagagacagggtttctccgtgttggtcaggctggtctcaaactcctgacttcaggtgatccgcccacctcagcctcaccctgggattacaggcgtaaagtaccacacctggccaaatttttgtatttttagtagagaaagggtttcgccatgttagccaggctggtcttgaagtccagactttaagtgatctgcctgcttgggcctcccaaagtactgggattatagacgtgagccactgcattcggccaccatgatccagttttagatttcctttgtactcatttgcagtcaatctttgtttctctatctagcttcagatgactactgaactgctgtcactatagatttgctttttatggaaaatttatataaacacaatcatacaatatatattatgtctggcttctttcacttcccataatgattcatctgtgccttagcatttatcagtagtttgttccttttattgctgtatagttttttgggcgaatcttttttgataaaaacagattaagggattaagattaacaaattaggagtgggcatggtggctgacacctgtagtctcctagcactttgggaggccagggcaggaggattgcttgagcccaggagcttaagattagcctgggtaacatagtgagacatgtctctacaaaaaaaaatttttttaattagccaagtgtggtggtgtgcacctgtggtctcagctgctgaggaggctgaggtgggaggatcacttgaacctgggaggttgaggctgcagtgaaccatgattgtgcaactgtactccagcatgggtgacagagtgtgagactctgtctcaaaaaaaaaaaataaagatgaacagattagggtaaattaaggagtctaatagaggttactatgaacaaaatgaaatctgaggcattttcacaggtagtgttcaaaatgtcaaaatggccccagcatctggttctttctgtgcatgagagctcttcagccctgatgggtttctggaratacctagagatgttcacagctggccagggagggattggaggtctttctgatggaagcccagggtgtgggccctgctgtgggaaagtacttggcatagtgagacagcacaaggtggccatgcggccagaggagagcataggaacagtagtcaaggctgaggaagattagcggtattggggcaggtcttgtaggaccttgtaggccacgacaagaactttggcttgtactcttagtgtgaagccatctgagggatttgagcagagcatgacatgagttgactttacactgtaaaaatactgccctggctgctgtgctggaaatagactgaaggaagcaagacagaagcggtgaggtgagtttgtggaatcccagtaaggatgaaggcgtgatccgactctggatatgtygtgaagctttaattgacaggtcaggtgtggaatcagagagaaatcaagaatgacactaaggtttttggcttgaacaaagggaggatacagtgggcattaattgagatggggaacactctcaaaggagctggtctggaaggtgactatcaggagttgggctttagatgtgtgaatttgagtttcctgttaggcattcaggccatggcaaaaaggttaagaaataggccaaagaaattgatagacatttcaccaaaaaaggatatacatatgtcaaaaaagcacttgaaaaagggttcaacctcattagtcatcagggaactgcagatttaaacccaccacaggatgctcccatatgccagttagaagggccaaaataaaaaatactgatgtgcgggtgctgatgaggtcacagcaactgaactgtcacacattcctggagggatggattgcaaagtgtatggtcactgtggaaaacagtttgtccatttattatgaaattaccacatgacccatcagtcccattcctgtgtatcctggatacatgaaaagaggtttacacaaaatcctgtacacgaatgtttatggcagctctgttcataatatccaaaacccaggtgctcatcagtgggtgtctggataaacaagctgtggtacatccatacactggaacactactcagtagtgaaaaagaacaaacttgctgcatgttgcaacctggatgaatctcaaaagcatggtgctgagtgaaagaagtcagcctcaaaagcttccatagtrtgtgatttcatttatacaacgacagtatagtgctggccagcagatcagtggttgccagaagtggggggtcagagatggatgactctaaaggagagcacaggggaattttgggggatgctgtctttatctgtaccctgattgtggtgctggttacaaaaatgtaaatatgttaaaatgcatagaagtgccccccccaccccccgccccaagtcagttttactgtgagaatttaaaaactcaaaagaaaaaaggtggaagggtgggtattgggtctgctaggattgaaaattgatggtacagagaatcactacccacaaaggagtctggaattgttctgtagcagtttggttggaagctgtgttcagggcttgaggcattctgtctgactatatgtttggtacacgttcatgtttttctttaacccaagccccaggtcccaggttccaggggacaacagcacagatttgggattggttatctgatgaacaagtacaaaaaggtgcatctcacactcacatatgtctgtgagtttgtctgtctctcgtctagttcactggatgagttagtctttggttgagttgcggagtgaaaccaacaaactctaagggatttttgagtacaggccccataagcccagtggcctggccatgctcattgtcccagagagcaaatgttaaataagggaatgctaggaagtcacagtaagtctcctgactgtcttaacgtctgctgtgttgggttaggtggagtgatcaatctttgagatttatctcaaaggataaagattgctgtgctgttttacagatttttcaaaaggagctctgttatgcctttttattaatgattcatattatggtacttgtgtatattaagtgcttcctgtgtgctaggtactgtgccagtttcattatttctacaggtatttattgagaacctactaagtttaggcactgtacttggcactggagacaaagtggaagggacagccaagtaaccacacaaataaatgccaaatgacaaccatgacataatgttgagtgatacaagccacacacaaaagtgcatactatgatttcattcatgcaaagttcagaaaggaggcagacccctctcagaagtcagaggagtgtttccctcaaggaagagtgctagttattgacagaaggggtcaggggagagacctctgggtgcctggttctctatatcctgatctaggtggttccacagctgcatgtctgtaaaaatatattgagtagtatgctgtgagttattcacctgtgacagctgtcagggctgtaggagagtgtaatagaggggtgtgatggggtcacgggtgtccaggcagagtcctacctgccttatccttgtcttgggtcagtatgtcccccagtgttgcctctctggggcccacactgggttggtgtagccattgccttgactaccatttccctctaacatggggagcttggtctgaggttcttggctactgtattttggagccagcacagtctttccttagacataaccctgagctgattttgttttctgtgttgtgtgtgtgtgtgtgtgtttgtgtgtgtgtgtttgcatgtggtgttgtgtgcaaaccatgtagatgtaaaaactaaacatttacttagagttaggcaaccctatgttatttcactgtgaacgtctttgtgttttggtgcattcaggcctctttttccttagatttttgtgtctatttatttctgaaatatcattagccctactttcaattatattgtaagataagcatgactcaaacattttaaccttgcttcagagtattagaatttttaaaaggtgagcccgtggaaatccataaattaggttttttaaaaatgaataactcataccctttatgtgtttattttatttgataaaccagagagaattataatgttcaaaagaaaggaagaaaaagaggttgctggttgaccaaagtgattgaattggtaaagtttggagaggggagtttcctaaggcgggccggagggcttgggcgaacagttcctggagtttcatcactcccgtgggcttggctttcttctcggtttctgggaaaatgatgggaagctgagaagagctggcttctttcatttcttcctctccctagattgtcaactttcttttcagtaacctgggtacaagtgttaggggaaaattctttgcgtaatttagagcttaatggtattaatagtaagtattgcaggttgtatttcaaattgccatctgtacttctactgataactgttgtgaggggaatgctgggattcattaacttggagattccttaagctcatttcaccctcttgttctccttttcattttcttttggacaggtctraaagtgatggtgaagcatttgcctagtcattcttgtctagagccagcttctgtggtcctgaaacccaagggttagttcaggtggtgtcataagccagtgttaagttgcacagctatgagcatttgaaaaagtgacagtgtaggctgggtgcagtgggtcacgtctgtaatcccagcactttgggaggcgaaggcagggggattgcttgaggccaggagttcaagaccagcctgggcaatataatgagaccccatctctacaaaaaatattttaaaataaataaataaaaaataagaaagaaaagtgacagtgtgaatgctcccattgtttcctcagccaagatgttccgaagggtgctcaccatcgtgcaggcccactgtaagctgggtttgactgcgaccctcgtccgcgaagatgacaaaattgtggatttaaattttctgattgggcctaagctctacgaagccaactggatggarctgcagaataatggctacatcgccaaagtccagtgtgctgaggtagctgggcctgggctgggggcgtctgggaaagggcctcctcctatgggcaggggagtgatcagatcgattcctcatgggcagacacaggtcaggacttaggctcacctgctaccacttcatacaggatcctcagtcaccctgtggttgggtggtactagacccacttgctgcatatcttctgtcttgtcacatatctcacatacccctgaatttgtgatgattctttttcctagccatggggtttaccagtcatggatttctgtgggtgaggattagcattcagggcacagggatgaatgaaggcccctgataccacagtgctgcctgggagcctggcagcaaagggctttgctctgatagccccaagcgcctaactgatatgctcccagccctgctgggaagtgtgtgaagaggtggcggtactcagtagcagtgctgactcgtgtgtggaagtgtggcytaaatggaagaattgctgacactaccaattgagaatctggtttcgcacacttgcagctggtgtgaaaataactccctggatgtgattgcatttaaaaatcttttaagtggttaacatgtgaaaacgtccagttcaataggaggtattaggttgggtttagttttgtgcatgcatttattttcagttgtactgatttctaattcacatagcatttttttttttttaaaacagggtctcactctgtcacccaggctggagtgcagtggcgtgatcttggctcactgcaacctccgcctcctgggcaagtgattctcctgccttagcctcctgcgtagctggaattacagacatgcactaccacacccagctaatttttgtatttttagtagagactgggtttcactgtgttggccaggctggtcttgaactcctggcctcaagtgatctgcctgcctcagcctcccaaactgctggcattacaggcatgagccactgcacctgactggttttgttttaaagctaattctgctagagaaaggtcttcaaaagttttaaattgtgtggtgtttaaacttgtaaaatgacccctggttcttactgtattacaggtctggtgccctatgtctcctgaattttaccgggaatatgtggcaatcaaaaccaagaaacgaatcttgctgtacaccatgaaccccaacaaatttagagcttgccagtttctgatcaagtttcatgaaaggaggaatgacaagattattgtctttgctgacaatgtgtttgccctaaaggaatatgccattcgactgaacaagtaagaattgaaaacttggagcttcctccaggccagtttctcttccccattgagagtgcagaaggtggctgttgttttgtttttttgtttttctctcaggaacttcttgggctccaaagatcttgttctgtggccctggtctcagaaaccagggaagacctgaagtaggtggttggagtcagaggttagagcatagagaaaaggggggctagtcaccttgagcccaaagaacagggagcagagacttggactgagctgggtggggycccatggaagatctgggctccaaaggtgggtgggagttggcatttggagctttgggctgtgtgagctctgtgggtggagaggaggccagactggatggcctaggggctgggaaggcaagatgggctgggctggcatcccaagtacggactggcatctggaaggagcttagaaatgcccacgcagtatcctcatcaacccatggctccacccaaatatttgtgcttaaaacctggcttttgtaaagctctgccaagtaaggaggaagaggtctgcgcttgctcctacagtgacacaggacttcaggtgctgtaagtgttgcagaaggccaggccctctatggagacaggtcaagctatgtgctatgggtactatacataggttttacttaatcctcacttcagccatataaaatgttgttcccattttatagaagggaagacaaactcatagaaagattaaatttcttaagtttctaaaattatacctttatttaatttagaaagactttttaatccaagtcaacatttagattattgtgaaaaacagcaattccctgcttctattttcccacccacaattctattccttgaagacagccgcttttgactcttttttgttgtttaccttcatatttctttctttcttccttttttcttttttttttttggagttagggtgtcactgtgtcacccagtctgtagtgcagtggtgtaatcacggctcacggcagccttgaccccctgggctcaatcaatccttccacctcagcctcccgagtagctgggtctacaggcacgcaccaccacacccagctaatttttgttttttgtagagatggggttttgctatgttgcccaggctggtctcaaactcctgagctcaagcagttcctcctgccttggcctcccaaagtgctgggattagagtcatgagccaccacacctggccagccttcatctttctaagcaatagcttatgtagtaatttcttgatgatcagttatagaaattgcctattaacttcctactgtaggagttgagggtttagctttcttacatacaccactctccccactcctgttttctctcctaccattctcccaatatgggaatagcacaagttgggggttactttaatattcagttacattattttgactgtgtaagtatgttcaggcagagctgtagagtactattacattttccttttttttttgagacggagtcttgctctgttgccaggctggagtgcagtggcgctatctcagctcactgcaacctctgccttgtgggttcaagtgattctcctgcctcagcctcctgagtagctgggactacaggcacccgccaccacagcctggataatttttgtatttttggtagagatagggtttcaccatattggccaggatggtctcgatctcttgacctcgtgatctgcctgcctcggccttccaaagtgctgggattacaggtgtgagccaccatgcccggccttacattttcttttttgtaaatgtttttttgccttggagttaataattgccttgtcattgtttttgcttggttttctgtgcattgaataattattcccctccaaagtcttcacataaccataaactcagtagggtcaggtaatttctcagttctgtttttctgtttccccagtgggatccccaccagcactccattcgcttactctgttctggcctgcttgctgtctaggactagagacaccaccagctgttaccatggggtttcccttggacactaccccatgacttccctgggcctctttgttgtgtttcccaccctgaaatctccaccctcttggttactcattttgatggagcacatgttccagtaggttcctgagagaagggatgtaggaggagaagctttggagacttcacatgtttacagatgtctttactcgactttayacttgatcagtagtttggccaggtcctagaactaacattggagcttccagtgcagcagtttggcagtctgatgccctttgcttcctctcagtgtgttgtctgctgtggtggctgtgcgttttccttcccttgaaaactggtaggatcttctctctttttggaaatttgaaagtgatattcttaatgttttttctttcatcgtgatgggcactcagtatatcctttccatctggaaactcgtgtccttcagttctgagaatttctgtttttttgttgttaatcactttctctatgtagtcccttcttggaattttgattcatcagatgttagatcctctgaacagcttctccagtttgcttatcttttttctacttttttatctctttgtcttctaacccttgtattgagacttgttaatttctgagagttctttcctggtaactgttcttgttttgtttgtgaatagagtgtcttctcggaggctttgaaaacttttgaagcttccgtctgtttcctgccatgtctcttttcttcatttttttgtcttaattgtttttacctgtcttttgagtctttctgagttttggtaatccttgactgtattttattggtttaaagtcactgaaaacctggcaggcctttctgtgtggcttagtgggtttgccagcttgtggacctcaccagagtggctgggcagggcctggctatttcttcaggaggttgccaaatgccagtatctctaggacttttctcttgggctggacggtttcttcagtgaggaatttttcagtcccctgggcaccaccgtgtgttaggggaagaggagggcttgtggaatctttgcattcagtcttgccttttccctcatctctgccgggcatccctggagaataagcctccagtgccccaccagtggaggtggcctgcctgctgccggccggacccaactgctcctcacactcacacactgccagtcctcctgtgcacctccccaccttctcaggcaactggtgactagttcctgagccctcctgcgtgctgcagaggacacagaggcggcgggttttgtatcggtcttccctcctgccggctccagcttctgctttctctagtctgttagctcaggtactgtgcctgcatctgtctgcttttcagcttctgaaatgttacccacttctctcatctgctgttatttcttctcctgttttcttkgtgggtttgtgttctgtcacattagtgccaatttgagcagggcaatgagacagttcctatatttactttgccttatttaagaactattctctccccatccttcctcccacagcaatgctcctccagtcttctggagcctcactccaggggcctcccccacctacatttgcagcactcctgaggcttgtgccttagccgcagcctcccgagcatctgcttgggcagggacgttaatttgcctggcactgtcaattccaagccagtctgtcacagtgaagggcagcagattgtggctgtctcctgtgtactagaatgatcattacaatgtgtactttttaccttttttttgtgtctctggcctttaaatgtatgaagtagtgttttttcttcttggttttctcgcttctaaaatgatcctgcgggccaggcgcagtggctcatgcctataatcccagcactttggggggccaaggcagaaagatcacttgagcccaggagttcaagwccagcttgggcaatatagtgagaccccatcctttaaaaaaaaagtgatcctgtggctctcgggcattgctccattctttgctcgtgtgtggtggggattctccaagcttttggctcctcccagccttcataagaaaggcattggtatcaccaaagcactttgcaagagaggcttagggttatatggcagtgtggggctgtgggcagagcatcgtttttgggatcagacagactggatgtgggaaagttgtttacctctgaactccttttgtacttyggtcacatggagctactgccacccaatgtgtactgggtcctggtgtcccttgatggtggggggtggattcttgtgcctggcagcttgtaagtatttagtaaatgtgacattctccacttggagggtgcttttccttctatttcatctgtgtgggggaacctttagaaactgagggctccccactgtgcaagtagtttttcctggtgatgggggaggagaaaaccacctaaaaacctgggtctcaagagtcaggctgttctgacgagtggggcttctaacctttttcactgcatgacatgcatagaaaatgataaaattatgtggtggccgggacattctggatcacggcaaggcagcttgtgactgggctaatcagaggccatcagcctgggtgtgcagctgcccaggccctatccagcttccccacaggcaaggggtttgctctttgaggtacatccattaatgggcactgctctgggtgctaacgggcctcggcagtggagcagccactcccaggttccacctgctcaggcttctgacccttggtttcccacatgtaaattggggaacatgaaacctgtcttttacaatgctgaggaatcttggcagggctggctggatttttttcttttctttttcttttttttttttttctgagacggagtctcactctgttgcccaggctggagtgaagtggtgtgatcttggctcactgcaacctctgcctcccaggttcaagtgattctcctgcttcagcctcctgagtagctgggattataggtgcccaccaccatacccagctaattttttttatttttagtagagatggggtctcaccatgttggccaggctggtctcgaactcctggcctcaggtgatccacccacctccgcctcccaaagtgctgggattacaggtgtgagccaccgcgcctggctggatttttttttttttaatgtaatactcagctcaatgcctggtgttggtaggtcctgcgtacctgtagtttgtcttcattgtctttgctgttgtcatcatcatcatcactgttgttatgattcttgggaagctacaaaaactgtccaccgtcacattccaagacagagggaaggagtgtgacattcccaatgctatgggatgataaccattgagttcattgatagggttgtaccctttggcagggagctggaaaatttttttttttttttttttttttttttgagacagagtttcactcttgtttcccagggtggagtgcaatggcgcgatctcggctcaccacaacctctgcctccccggttcaagtgattctcctgcctcagcctcccgagtagctgggattacacacatgcgccaccacactcggctaattttgtatttttggtagagacggggtttcttcatgttggtcaggctggtcgtgaattcccaacctcaggtgatccacccgcctcggcatcccaaagtgctgggattacaggcgtgaaccaccgcgcctggcagggagctagaaattaaagagaagtttttaaaacttagtgttatgggaaatcagcacaataatggctgaagggcacttttctcctttctgctcatctcttggagcatgcctgtgtcttggcaaacagttgcttccagcctttttttggaaatagcagtggtttctktgcacctctctttgggcttcatgaaatgtggagatgctccttgtatagactctgtgctgagagtaagagatgttgaagcaggaaaaagcatagtccaaaaagaaaacgaaaaatggaaaggagggaatcccgaagagaatggtgggcctaaacctagaatcagtggggaaggctgggaggtgcatctgtagccmgtcatttttttgggtgtaacgatattcctacatgacragggctttctacttgagaagagctagcctgagctcctttttccctctgatgtgttttcaagataactgaggcattattytgtggtctaacacagcttcattcttctctagaccctatatctacggacctacgtctcagggggaaaggatgcaaattctccagaatttcaagcacaaccccaaaattaacaccatcttcatatccaaggtttgtgtggcatatggggtggaggtgaggcccctagcactctggggacctggggggtacactrtgattcctggacagtgaattcatgtctgctgaaggaacttctcctgcatgttttcatttccgacatgtccagggatagggggcactgcctggggttagtggaaggagcagactgaggatttgcatgcatcatggataatctataaaggctatttgaggtttttccagttcttttggggatgtagaagttttaagttgtatttccttatttataaaaggaaaaaaagttcatttcctactctggcaaaagtaggcatttagatgaagttctctttacaagttggagatcctgtgtgtcgcggcagcctttgtcctggttcctggtgtcccttgatgatgggtggtggatgtcagcacagacttccgcaggcccagctcagggatggtttactctgcaatcagaagctgtagccccacagtttagaatagtcattcagattaagacagacccaaagcccaaaagaaatgagattttacaaccgggcgcggtggctcacatctgtaatcccagcactttgggaggctgaggcgggtggatcaccggaggtcaggagttcgagaccagcctggccaacatggagaaaccctstctctactaaaaatacaaaaattagctgggtgtggtggcagacgcctgtaatcccaactactcaggaggctgaggcagcagggttcagtcasttgaacccgggaggtggaggttgcagtggagctgagattgtgccgttgcactccagcctaggcaacaagagygagactccgtctcaaaaaaaaaaaaaaaaaaaaaaaaaaagaaatgagattttatgtgattgtggctgggcgcttataagcaccaaaccttcatgtctgtggctgggaacctcgatgtttggagccccagagctgaggaatccacctacagtcagaattccatatggggcagttgttcctcccaggtcacatcccacgtgtgctgctggtgtcagtggccaacaggtaagagtatggatggttttgtggagacatatttctgtagccaaaaaaatgaatgactcaaagtcagtctctgttcaagggccctctcatctctgggctcctggcacccagcactgaatgtcactgatgcctggtattaattcttcaggatgactcttagcagaactcacacaaggtcctggagacccagagatgcctttctgaggtttattgcttcacctctctctgcctgcatcagatagaccctggtataaagaggagaaaagagtgattatgtttcaaaattayctacagaacttatttaaattctggatcagttgactttttttttttcctcatatataaaaaccttccaacttgtttctgtaggtaggtgacacttcgtttgatctgccggaagcaaatgtcctcattcagatctcatcccatggtggctccaggcgtcaggaagcccaaaggctagggcgggtgcttcgagctaaaaaaggtaaagtggcctttcatcttctgttgcaggaggtcactcctcttaaaccactttagttaggaagacgataggggtgagagctgccatgtgccctggggctaaatagactctggagggagrgaatcccaaagcaaagacctagatccttatggcccatcattatttctcataccttgggggtgaatatgcaggtgttttccatgacagtgtcacggaatccacacagatgtgctctgtacactgtgcagctgtgttggtagatggtgagagggagccagggcaaggcagtgcttatggggtagacatggaagggagaaaacagagctgggccaccagtgtaagtggaggagctggaagctgcttctggaacttgatcaggaggcagggaaaggtttggtaggagcagcttgggcagacacacaatgggcacgtcattcataacctgtgcagagtgccgccctggtggcagcttgcagcaggggcagggcaagctcagtgagtgaggaggtgagaatcctcattgcaaaggctttttctgaggaggcgtggcacccctgtgcttgcttactgcggtaaaagggcccagactgccattgtggacatggcagggactgacactcttgctaagagatggccgtgtctgtcttactgggaccagggcacatcctgagacaaggacacaagccctatcctcaaggagtctgcttattcaaggaggcatctggactgctagaatgtttgaaaatgacaagattagtgggcatctgttggaactgtactgygttcagatgtgtttaagaagcgtctagtagcttgtatttaaaatggagatgaggcagatagcatggactagaaatagcatggactcaggcaccaagccagctgtgtcacctttggcaaattattttctcctctgagacttggttttcccatccaaagtgggggtgacaatcctgtcttgccaagactgctgtgaggattcagcttataagtcataaaatgtagtcggctggctgggcacagtggcttacacctataatcccagcactttgggaggccaaggcaggaggatagcttgagcccaggagtttgagaccatcttgggcaatgtagtgagaccccatctctacaaaaaataaaactagctgggcgtggtggtgtgtacctgtggttccagctacttgggaggctgagacagtagcttttataaactgacaggactatgatctgctagcaaatgtgaatataattcattacttattccttactctaatttgaaaactcctttattgattgattgattgattgattgattgagatagagtcttattctgtcacccaggctggagtgcagtggcacaatctcggctcactgcaacctccatctactggggtcaagtgtgattcacctgcctcagcctcccgagtacccggactacaggcgtgcaccacnnnnnnnnnnnnnnnnnnnngtattctgggtgggggactcccacagggcatagggcaggcagagcatcaggtgagggcttccaccccagagttttcagggcacgtgccacacaggccctgtggattcaggacaaataaaccctctagaaattcagataattgaacagactattaagaagaaatgataggccaggagtggtgactcacacctgtaatcccagcactttgggaggccgaggcaggcagatcacacagtcaggagatcaagaccatcctggctgacacggtgaaacccggtctctattaaaatacaaaaaaattagccagatgtggggacaggtgccagtagtcccaactactcggaaggctgaggcaggagaatcatcgtgtgaacccgggaggcggagcttgcagtgagctgagattgcgccactgcactccagcctgggagacagagcaagactccatctcaaaaaaaaaaaaaaaaaaaaaagtgaatagaattgttttcttactcaaaacactgtttaacatgacacttggctcctttctttgcatctctgagctcttgtaagatttgagaaacaattacattcaagggcagtatgcttaacctactgacatttgaactacaaagcaaagatgttcagattttcctgaaggatcaagtctttcaggccacagaattttctgtcctagttttttaatacagtagtccccccatatctgcaattttcctttccacattcaattacgcatggtcagctgtagtctaaaaatattaaatggaaaattccagaaataaacaattcataagttttaaattacacactattctgagtagcatccatgatgtgaattcttgctttgtgcggcatattcatgcttaaattctccccacccattagtcacttagtagccatctcagttgtcacggactgtcactgtatctcagtgcttgttttcaagtaacctttatcttactaatggccccaaagcacaagtgtaatgatgctagcaattcagatatgccagagaagctgtaaagtgctttcttaaagcgaaaaggtaaaagttattaatttaagcaagggaataaaaatcatatgctaaggttgctaagatcgagggtgagaatgactcttcctgctgtacaagatgatcatccccaragcacatagccgtcagactttccaaggtcaatacaaaagaaagaatcttaaagacagctagagaaagggtcatataactcatcatgctaacagcagacttctcagcagaaactttacaagtcagaagagattgggggactgtttttagcattcttaaagaaaagaaaagaaatcctggctgggcacggcrgctcacacctgtaatcccagcactttgggaggccaaggtaggcagattgcttgaactcaggagtttgagaccagtctgggcaacatgatgaaaccctgttcctacaaaaaatacaacaattagctagctgggtgtggtggtgtgcgcctgtagtcccagccactccggaggctgaggcaagagaatcgctttagtctgggaggcagaggttgcagtgatctgacatctcaccacggtattccaccttgggcaacagaacaagatcctgtttaaaacaaaaacaaacaaaaaaacaggccaggcgcggtggctcacacctgtaatcctagcactttgggaggctgaggtgagtggatcacctgaggtcaggagttcsagaccagcctggccaacatggtgaaaccccatctccactaaaaatacaaaaattagccgggcgtggtggcaggtgcctataatctcagctactcaggaggctgaggcaggagtattgctggaacccaggaggcagaggtttcagtgagccgagattgcaccattgcactccagcctgggcaacaacagcaagactctgtctcaaaacaaaaaaacaaaaaccaaaaaaccatagtgagacccagtctctttaagaaaaaaaataaaaaagaaaaatcctaaccaagaattccatatcctgccaaactaagctacatgagcaaagaagaaataaaatctttcccagacaagcaactgctaaaagaatttgttatcaccagactggccctacaagagagtcttgagagttctaaacatggaaatgaaagaatggtgacacctgctaccacaaaaatacacataagcacatagcccacagaccctgtaaagcaactacacaatccaaactacagagcaaccagctaatgacaccatgttaggaataaagcctcatgtctcaatattaaccttgaatgtaaacaacctaaacaccccacctaaaagacttggagtggcaaattggattaaaaacaagacccagccttctgctgtcttcaagagacctctctcacatgtaacaggactcataggttcaaagtaaagggatagggaaaaaaatctatcacacaaataaaaaaaaaaaaagagtggggcagggggtcactattcttgcatcagataaaagagactttaaaccagccacagtaaaaaaggacaaaaaggtcattacacgatgataaatggttcaattcaacaagaagacttaactatcctaaatatatatgcgcccaacattggagcacctagattcataaaccaagtacttttagagctaggaaaaggcttagacagccacacaacaatggtaggagattttgacaccccactgacagcatgagacagattatagaggcagaaaactaacaaagaaattctgtacttaaaattcaacacttgaccaattggacctaataggcatctacataattctctacgcaacaaccacagaatatatattctcatctgcccccagaatatactcttaagattgatcacatgggcctggtgccgtggctcacacctgtaatcccagcactttgggaggctgaggccggcagattgcctgagctcgggagtttgcaaccagcctgggcaacacggtgaaaccccgtctctactaaaatacaaaaattagctgagtgtggcggcatgcgcctgtagtcccagctactcgggagcctgaggcaggagaactgacttgaagccgggaggcagaggttgcagtgagccaagatcatgccactgcactccagcctggggaacagagcaggactctgtcacaaaaaaaaaaaaaaaaaaaaaaaataattgatcatgtgtttggccataaagcaatgtgagactttatgctcgactttattaaagtctcaataaattcggcagggtgtggtggcttacgccgataatcccagcactttgggaagccaaggcgggtggatcacgaggtcaggagatcgagaccatcctggctaacacagtgaaaccccgtctctactaaaaatacaaaaaattagccgggtgtgtggtggcagttgcctgtagtctcagctactcgggaggctgaggcaggagaatggcgtgaacctgggaggcggagcttgcagtgagccgagatcgcgccactgcactccagcctgggcaacagagcgagactctctcaaaaaaaaaaaaaaaaaaaaaagactcaataaattcaaaaaagtcgaratcataccaagcattttcttgggtcacagtggaataaaagtagaaatcagtaccaggaagaactctcaaaaccacacaattggccaggcacagtggctcatgcctgtaaccgcagcactttgggaggccaaagtgggaggatcatttgaactcaggagttcaagaccattctgggcaacatagcgagacctcatcgctaaataaaagaaaaaagaaaaaaaaaaacccacacaattacatagaaactaaacaacttgctcctgaatgacttttggataaacaaattaaggcaggaatcaaaaattatttgaaacaaatgaaaacagatacaacatactaaatctctggggtacagcaaaggtattgttaggaaagtttatagcactgaacacctacatcgagaagacagatttcaaattaacaatttgagatttcacctgaaggaactagaaaaataagaacaagctaatcccaaaactagctgaagaaaagaaataactaaaatcagagcagaactaaatgaaattcagactcaaaaacaatacaaaggatcaatgaaataaaaagctggttctttgaaaagatagataaggccagtcgcagtggctcatgcctgtaatcctggaactttgggaggccgaggtgggcggattacaaggtcaagagttcaagaccagcctgaccaacatggagaaaccccgtctctactaaaaatacaaaaattagtcgaatgtggtggcgcatgcttgtaatcccagctactcaggaggctgaggcaggagaattgcgtgaacccaggaggcagaggctgcagtgagccgagatcgcacctctgcactccagcctgggtgacagagcgagactccgtctcaaaaaaaaagataaataagattgatggactgctagttagattaacagaaaagagaagatccaaataagcagaatcagaaatgacaaaggtgacatcacagctgatccccagaaatacaaaagattctcagagacttaaaaatacctctgtgcacacaaactagtaaatctagaggaaatagataaattcctggaaacatacaacttcccaagattgaatcagaaattaattgaaaccctgaacagatcaataaggagaaattgaatcagtaatttaaaaaaaaaatatggccccaggcatggtggctcacacctctaatcccagcactttggaaggctgaggcaggtggatcacctgaggtcaggagttccagaccagcctgaccaacatggtgaaacctcgtctctactaaaaatacaaaactaggtgggcttggtggcgtgtgcctgtaattccatccacgtggaaggctgaggcaggagaattgcttaaaccctggaggtggaggttgcagtgagctgagatcgtgccactgcactccagcctgggtgacagagtgagactccgcctccaaaaaaaaaaaaaaaaatctaccaactaaaaaagtcctggaccagatgtattcagttctactgaaactattcaaaaaaattgaggaggagagacttcttcctaactcatactacgaaaccactatcatcctgataccaaaatctggcaaagacacgatgaaaaaactacaggctagtattcctgatgaacacagacgcaaaaatctgtaacaaaatgaggacaaagcaaatccagcagcatatcaaaaagttaattcaccacaatcaaataggctttacttctgggatgcaaagttggttcaacatgtggaaatcaataaatatgattcaccacataattaaaaatgaaaagcatataattatcctaatagacacagaaaaaggttttttgtttttttgaggcagagtcttgctcttgttgcccaggctggagtgcaatggtgcaatcttggctcactgcaacctctgcttcccagattcaaactattctcctgcctcagcctcccaagtagctgggactacaggcacgcaccaccatgcccagctaatttttttgtatttttagtagagacagggtttcgccatgttggcagtgctggtcttgaaggcctgacctcaggtgatccacccaccttggcctcccaaagtgctgggattataggtgtgagccactgcgcccagcccagaaagagcttttgataaaattcaacattccttcatgataaaaaccctcaacaaatggcatcgaaggaacatatctcacaataataaaagccatctatgacaaactcacagccaacatcatactaagtaagcaaaagctggaagcattccctttaagaactggaacaagacagccgggcacggtggctcttgcctgtaatccgagcactttgggaggccgaggtgggcggatcacaacaaggtcaggagatctaggtcattctggctaacatggtgaaaccccatccctactaaaagtacaaaaaattagccgggcgtggtggcaggcacctgtagtcccagctacttgggaggctgaagcaggagaatggcatgaacctgggaggcggagcttgcagtgagccgagatcacgccactgcactccagcctgggcgacagagcgagactccgtcccccagaaaaaaaaaaaaaaactggaacaagacaaagagcccaccctcaccacacctattccacatagtactgaaagttctactcagaccagtctagcaagataaagaaataaaaggcatccagataggaaaaaaggaagttaaattatctgtcttccctaatgatgtgattctatacctagaaaaccctaaagactccaccaaaaggctcctagacctgataggcaacttgagtaaagtttcggaattcaaaatcaatgtacaaaaatcagtagcatttctatacaccagtaacattcaagctgagagccaaatcaagaacacaatccaatttataatagctgtaaaaacaaaagacaaaacctaggaataactacagaacactcctgaaataaatcataggtgacagaaacaaatggaaaaacattctgtgcttgaggattggaagaagcaatatcattaaaattgccaaactgcccaaaacaatctacagattcaacactattctatcaaattgccaacatcatttttcacagaattagaaaaaaaacttataaaattcatctggaaccacaaaagcacctgaatagccaaagcaatcctaagcaaaaggaacaaagccaaaggcctcacagtatccaacttcaaactatgctacagggcttacagtaaccaaaacagcatggtactggtacagaacaggcacatagaccaatggagcagaatagagagctcagaaataatgccatgtacytgcagccaactgatgttcaacaaaattggcaaaaatatgcagtggggaaagtactccctattcaataaatggtgctggggaaactggctaactgtatgcagaaggatgaaaccagacccctgcctatcaccacatacaaaaatcaactcataatggattaaagatgtaaatgtaagacctcaaactataaggatcctcgaagaaaacctaggaaatacaatattcacaaagttgtgcaactatcaacacaattcatgtttagaatattctcatcagctcccaaaagaaaccctcatccatgcacagccactcctaatttcctcttgttcccaacccccagctctaggcagcccctaatctactttgatgtctgtaggccttttctggacatttcatgtaaatgcagtcagaccacttggggccttctgtgactggtttcttttcacttagcataatgttttgtttgtttgttttttggagatggaatctcgctctatcgcccaggctggagtacagtggggcgatcttggctcactgcaaccactgcctcgcaggttcaagggattctcctgcctcagcctcccgcgtagctggaattacaggcatgagccaccacgcctggctaatttttctatttttagtagagatggagtttcaccatgttggccaggctggtctcaaactcctgaccttgagtgatccacgcccacctcagcctcccaaagggctgggattacaggactgggtcaccacacccggcagcataatgttttcaaaaagattatctatattgtagcatctgtcagtacttcattcttttttattgctaaataatattcgattccatggacataccacattttatttatccacacatctgttgatggacatttgggctgtttccactttttggctcttagaagaattctgctatgaaattcatgtacaaatttttgtgtggatatagtttcatttctcttggatttatgcctggaagtggaattgccaggtcatgtggttataacagtgtgtttaacattttgatgaactgccagactgttttccaaagcagccgcatcatttacattctcaacagcaatgcatgcgggttctagtttttccacatccttgacaacagtggcagttatctgcttttttgattgtagccatcctcggagaggggcgtgaggtgataatctcattgtgcttttgagttgcatttccctggtgattaatggtgtggagcatcatttcatgtgcttactggctatttttatattgtttttggagaagtaatctgttcatattcttctctcatttataattaatttgtcttgttgttgagtttcaacagttctttgtataacstagatacaaatcccttatcagatatatgctttccacatttttttattctgaggattgttttttcacttgatggtgtccttggaagcacaaaagacttccaaattttgatgcaatcccatgccaagttcaggtggtaaccccgagtgcagggcttttccactccagtgcttgcttttgagcctgggacccttagctcttggcattctaatggctaatgttgtcttctttattgccrtttctcattttttcctgcagggatggttgcagaagagtacaatgcctttttctactcactggtatcccaggacacacaggaaatggcttactcaaccaagcggcagagattcttggtagatcaaggttatagcttcaaggtacatatccatttggcttctggttagactaggaccaaggccttcttgataccctggcctccaggagaagcgagggccactgtcagcaggcaggcaccaagcattaggagattagaggccttgcctcaaactccctttatctctgcatgaatctctgagggcagctgttggtggaaagtgtgccgtcctggcaggactgaggtgccatggcrctatgaccagcactgtgtgaatctgagccccgcagggctgctttctcagggatgcctctctaggtagctaggagagctcttcctttcatcagctggtaagctccaggccttagtttgcctcagtttgcctcccagacatcagagctatcctgtactacaaatcaggtattttaataattgggaaattctaaagctttggctaactttcactggctgaggcatttgctttctttcctgttacacaaatattacgtttatgtcagtatttggtgtccagagggctttatattttggggatagatggagggttctagaagtaggggaattaaattccccctatggtccactaaaaggacatccctagaacattagactcccaggttcttgattgcaaaagacygcaatccaggctgccttttgagatacgtttttaatgtgtctctttatgcattggtgagagttcccattattggccttaggaggacagggttgtctgaccttccctcttttagctagaggcagtgacacytcagacctctcatgctggcctagaggacaagatgcttgggttttgagcccagttttttggaggatttgcatcatgacctttttatccatccatgaaaatccctgttggtaatagcattcctacctcctgattcctgccgagctgtgagggtaagaggagcaccaggtcagaaagagcaattctttgaaaggtgacctcgacaaaaaggcacaatgccatgccgtagtagtttgtgttggttggagctgtgtcttcggtgctgcctgttgaggagcagtggttggagttcccagagtcatgacgtggagtggctgggcctgggcagatgtgcacatcgtctgtactctggatccctggcccagaaggactcagatccttacttctaggaattttcatttaatgaacattatgagaattggagggaaggagaattccctttacagaatcaacccaagttttctgcagggatagggagcccttgtagtaagttatccccatagaaatgaaaacccagtctccaccatgctgttcttactctctcagagaagctctataaataatcttcctgatatcctatcattttcattttcacgtgctcattcctgctgraagccccagttgcggagcacagcagatgccagggaccttcacaaagggccacagcctgtgccttccagtcacttgtcccttcctttgtctgctccaagatgtgaaggctacccgaaggagccttttaaaatcactaagattcttcctgttgatcttccatacatgatcatttagatgctgtgtgctgggggcagatttctctgaaattcctgcatccctctggtcttgagatcattagtcaagctccctgttaaaggcggctcctgatgctggtctctggaatgctagggaggagctctccattgttggccaccagggtggctgggcctggggagggaagtgaccaaagcaggtggacccaggagaaggcagaggagggctggggagagagagcagaaaggggcatgtctgctggcttgggctttgcaggtgatcacgaaactcgctggcatggaggaggaagacttggcgttttcgacaaaagaagagcaacagcagctcttacagaaagtcctggcagccactgacctggatgccgaggaggaggtggtggctggggaatttggctccagatccagccaggtgagtaaatgggtgaggaggttccaggtgtcagtgctctcacagggcagcgtttgtagacacagacacagacatgtagtcctgcctggatgggcccatgggatttttttggaaatgttggaaaacacggaagagatgaacagaaacaatccttgttgcccttttggtgtgtgccccttgtactgttgcacacagctgagctcacagtggctgtgactggtctcctgctttgctcacacgagtatttgttaaatcttgatgttgaagcccaggatggcaagcaggtgaccccagctcaccttggtggtgactggagggagcatgatgggctgggggtacgtagttcccacacacagggctgccatccctggctgtggccacacagttctcctctggttcctcctcagtgataaagctgagccctctagcccctaagactgctctgaggatcaactcttgtggtagcttcgatacttaactttgaaaaatgtagagttctgtgaaaatactcaacctttcatttattctacaaatatgcctgctctaggccaagtaaatatatggtctaattagtgagagcatcattatggagaattagcaggcctgtccaaggggagaagtgcacttcagtcaggtgcgtttgaaattcagttgccattagagccggaaggtgagcaactgctggaccaaggcaagaaggaaacagctgtccctgggaaggggctgccctccctccagcctaaggctttcctcccccgacccagggggcactctccatgggaacccaggagagtgctctcattgctctcactggttttaaggaggtgcctggttcattctcctcacaggatagcaatgtcagcactgatgtggttatccccattttacagatgaggtcattgaggtgcagacattaattacttgcctcagggttactcagggacaggaggagccaagagtcaagcccagggctttctgtccttccacttgattcaaagccttatggtggtgtctcaggagattttaaggaacttttgccctaactgttaaaaaattctgttcaggccaggcatggtggctcatgtctgtaatcccagcactttgggaggcctaggcgggaggatcagttgagtccaggagtttgagaccagcatggtcaacatatcgagaccctgtttctctcttaaaaaaaaaaagtttgttcagaagttgttattaagtgaggtagtgtggcattatggttaagaacagtctgaagccaggctacctgggtgttcaaatcccatctccttaagagctatgtgatcttggataggttagttaatctctctgtgtctcagtttcctcttctttcaggtgtggattatagtagttttgaggattagaggagataatgcatgtaaaatgcttagaacaatgcctgagacagtaagcgatctgtaaacattattaaaaatgatgtattaaatttatgtaagtcttataaaatttgctgtgattataartattataaaaggagtatcttttcttctggagactaacatgggctggttcccccttcccggcaggcatctcggcgctttggcaccatgagttctatgtctggggccgacgacactgtgtacatggagtaccactcatcgcggagcaaggcgcccagcaaacatgtacacccgctcttcaagcgctttaggaaatgatgcttaggcagggtacttcgttcaagacyggcgcttggcacccttgttggaaagggattttcagcataacattttccttccacctctttgaccttccctccagcgttggccaaattgtgctgaggaagatgcatcaagggcttggctgtgccttcataggtcatctagggttttatraaggaggaggagacaatattttttcaaactttttggggagtggggtcatttctgtatataaaaaatgttaatatttaaggtrtatttatgttaccgttctgaataaacagaatggaccattgaaccagtcttcattgtacaagtgtttttatgcttcgtcctgggcatgggttatgtctggatgaccaacctccatcaaggccctactttgtagcaagcacagatgagtaagatggagcccatccccagggagctaccagagagatgtaccctgagatagaagaaacgttggcaggaaaggcctggggaacggggagggtgatccagccagagggaagagcctgggtagttgactgtggtccctgctcacagcttagcctggtggattcagactggggcttcaaccgcacagcttcctgctgttctggtggtcacagctgttcctacagcctcgtccgaggtagacacccacgtcatgaaggccttccaggttggctcctggtgcctcatcttctctgagagagtgacctcttgtttctccctcaaagtacgtttttagaaattgctgagaggctagattcctcttctaatagcagtttagtgcccttgggtgttttaattgctacttcctttatttttaatggctttgggcttttcttttatgttcctggtatgaaagcaaaggtgttgaggaatagacaggccaggtaggattgcttcttgaaaggtaggcacacataaggcatattcgccttgcagaaagacttgtgattctgaggaggaagcccactctgcctgtaacaggaaacagcgctcacacttggggagtgttgaaaccctggctacataaggcttccaagtggagtccctccccatccccacagctcggcagcagcttcctgtcctcagctctagcacaggtgggctactctctgtgatgcagccacagactgaggagaagaaagtattaggttggtgcaaaagtaactgcagcttttgccattactttttttttttttttgagacagtttcactctttgtccaggctggagtgcagtggtgcgaacttggctcactgcaacctccacctcccgggttcaagcgattctcctgcttcagcttcccaagcagctgggaccgcaggcgcccgccaccacgcccagctaactttttgtatttttagtagagatggggtttcaccatattggccaggctggtctcaaactcctgaccttgtgatccgcccgcctcggcctcccaaaatgctgggattacaggcttgagccaccacacctggccaccattacttttactggcaaaaaccacaattacctttgcaccaacctaatacctctcttatcagggggctttgaagcaagagccacctgccccacataccgcctctctgagctgaccttttggtgacaaacacactctcatagtctggtcagtagctggtgctgccaggcatctagccactatcagtgcaagccccaggaaccagcaacagggccctcgctaggagtagggggcccgagcagccctgtctgaggtgcgggcttgagcccacagactcgcctgtcatgtaaccctgatgggtcggcactcaaatgttcaaacttgactgtaactcttttcagtctacctcctgtcttgcctttacacttgagatcctcaaacaatactgagcatttcctgtattttcacatttctggcccctgttttcttgtctactgacaatgttgaattttacctgagcactgtgatcctaggaaatagatacatttaaaggaatcccttgtccttggtgttctggaaaatggcttactgcagagaaccatccttcctggtatgactcatgaatgctccccttgaagaccccagtcgaggccagacacaggccttccaaattcccattctttgcctcataaattagctaaactgcttgtccccagtgatcaatgggaacaaaatgcttgtgaaccagactttgctttacaaactttggctcaccctcccctccacccctcgagagaatagactggactcagggtaagtcactgattggatctactgtcccaccatgctactccccttcatcccacttcctgtcttttacttgcttcccctccctataaaagaaaaccccttttgtctaaccctgagacaaacagatcttatgttcagtgcattctccctgctgcaatagtacacccctccccaccactttgcaacaatcctttcaaataaagtctccctttactaagtccagattttttcttcttatttttcttaacattgtctattctgtgaacttgagttccagattttttatttgacatcatgtaacaagtttttatctaaatttccaaatgtctgttggtagtatataaaaatataattcatttttatatatcagtttttatatatcattcctcagtcatgctaaactcagttctaggaaatttttctgtagatttctagaataagtagactaaaatcaatgaagatatagaagacttgaacaatgctattaaccaacttgacctaattgacgtttacagaattctctactgagtaacagcagtataagcattattttcaaatacacagatcacttgccaagacggaatcaatttcaggccctacaagtccattggaaagtacattggtaagtatttaagccatacaagctgtaatctgtgcccacagtgtgattaagttaaaaatcaatagaaaaagagtctggaaaaccctcaaatatttggaaaacgtggtggttaattttaggtgtcagctgagttaagggatgacaggtcactggttaagcatttttgggtgtgtctgtgggcatgtttccaggaacgaggagcatttgaagctgtagactcagatccacccccaccaacgtgggtgggcctcatatacccatcaagggaccagacagaacaaaaggatggaggaagggtgaatacaaattgcagaatacaatattgatacattaaaaaaaaaataattggccgggcgcagtggctcacgcctgtaatcccagcacttnnnnnnnnnnnnnnnnnnnntgtggaagaatctcttgaacccaggaggcggaggttgcagtgagttgagatcacaccactacactccagcctgggctacaagagcaaaattctgtctcaaaaaaaaaaaaaaaatcaatgatctttttatatacttagagacaaacatttggaagttgaaacaagaatactatttacaatagcataaaaatatgcaatgcttagggattatcttatgaaatatgtaaattctgcctgtattagcctattaatttaatcttttttttttttttttaaacaggatctcactctgtcacccaggtgagttcagtggcacaatcaaagctcacttcagccttggcctcctgggcccaagcgatcctcctgcctcagcaccccagtccgacccagtagctgggactacaggcacctgccatcatgcccggctaatattttttttttaaattttttgtagagacagggtctcactatgttgcgcagcctggtcttgaactcctgggctcaagtgatcctcctgccttggtttcccaaagtgctgggattacaaacgtgagccacggcacctggccggtttaacctattttaaatcaaattcttaaccagatttttcatggaaacgtacaaactaatggtaaaataaatgtcaaagaataaagaaacaaaaatatcaaagagaatttataagaacagtgcagtaggcacaggaacagaaaaatataccagtggaatggaatacagagcctagaaaaatattactgagaacttgatctgtgatagaagtagcattatataagtgtgtatacacacacctacatatcctcctacatctatatccattccaacagtatctttctatctatctatccccatgagttcacactgaaatctctacacagggtttatttgtttatttattttcagatggagtttcgctcttgttgcccaggctggagtgcaatggcacaatctcggctcactgcaacttccgcctcccaggttcaagtgattctcctgcctcagcctcctgagtagctgggattacaggtacccaccaccatgaccagctaattttttgtatttttagtagagatggggtttcaccatgttggccaggctggtctcgaactcccgaccttaagtgatccgcccgccttgtcctcctaaagtgctgggattacaggcgtgagccactgcatgcagcccacaaggtttattttatcatctattttatgttcacaacttcattctttgacaatgagaaaactggctcccattttacacaatatattaatattttcttatttgctcccttataggatgtacgaaagtcatttcagacctgttagtttatgcctctgtgaaaattagattttaattttaattcgagttctaattagatgactctaattttcatttaactctaattttaattagagttaactttgtgttagggatgtttgggtttggaacctgacggcatagagacttaatcttgtgttgcttgtgttttttccccaaccatccttcaatgtggttatgttgttcatttgatgagcagtttcattcatttggggctttttgtatcaaactttagtttgtataagattgtccttatcgttgttgatttcttatttatttatttatttgagacggagtctctatctctcgccaggctggaatgcagcggcgtgatctcggctcactgcaacctctgactcccaggttcaagcgattctcctgcctcagcctcccgagtagctgggattacaggcatgcgccaccattcaaaaatgccctagcattctgtgatgcaatattgtgtgactgaaagaaacagtatagaaattggaagactggatcttagtttgtggcgggctgtaccttactatatgaccttggggaattcacccaaactgcttttgcctccatttcctgtttgatttctccatatattaggtcagagcacaaggaagatctgaagaacatatttaaattccaaaatgaaatccgaacatctctctgagaaaaccttttttttttttttttttttttggagacggagtctcgctctgccacccaggctggagtgcagtggcacaagctcagctcactgcaacctctgcctcctgggttcaagtgattctcctgcctcagcctcccgagtatctgggactacaggtgtgtgccaccacacccagctaatttttgtatttttagtagagatggggtttcaccatgttggccaggcttgcctctaactcctgacctcaagtgatcctcccgcctcggcctcccaaagtgctgggattacaggtgcgagccaccatacctggccgattttatttatttttctcttttaagcatgtaaaacactaacatgattccaaagtctagactgcacaaaaagttatatttaggaaagtgcctttctcttatccctgtttcctttgtgtttttcatccctttcttgacattccttgtaggtatctaatttcagtttctggtttatcttgcctgtgtttcttttttgctgaaatgaacagacacatatgtattttcttatttttccttcttattttttcttctttcttacacagtagatattatactgtagataatcctttgcactttgtctttctttaataaattctggaaattttatcaattcattgaggtcttcctcattctttacaacctcatggtagcccattctgcaaatgtaccatagttcatttaagcactgttagatgtgtggcatttaagttgtttaaattattttccaattgcaaacaatgcttcaataataaacctgtgcaaatgggttttcttatagttggaagtatatctttagggtgaattcctggaagtgggattgctgattcaaaggtaaatgcagggacaagcacagtagctcatgcctataatcccagcatttttgggaggctgaggcaggaggatcacttgaggtcaggagttcgaaacgagtctggccaacatggtgaaaccccgtctctactaataatacaaaacttagccaggcacatgcctgta

SEQ ID NO: 96132 - DNA, 39018 bp, Homo sapiens
  misc_feature (1)...(39018): n = A,T,C or G
aggaaggctttccaaataaaggtgagcgagcgaacctcctgtcttcccctgcggcctttgctgaggcacaccttcctttcagaattcaccagtgtctccttctcggttatctgtcccatcaccagtatctcagaaacagtgagtgccgtgcagcaccgcccctactcagcgtctactagaaattctcatcactttcctgcaaagcaggtgtagtgaaaggcataaaaaccctggaaacagatttgggttcaagtattaactttgctcctaacttaactcttttgggaacatctctttaacttgtttcttcatctgtgaaggaggataatgtgcccatgtcatagaatagctgcgaggaccaaatggattcacaggtgcccaggatagtgcctgatgctcaacagatgattaaaacgtaagccaatatttcgtaaagccggtcaatgacaacaatagtttttcatcatggaaagttagagatttttggcagtgaagaaactgctgctaagtctttgctggctcacaaatcccactggaaaatgcccacattctttgtaggaagaaatgtttattttctgcctcaggtgaccaggattatcacggcttcagtagcaacacccgattcacagagaagacgatctgagatctcccagttctgtctcctggtataactttgttttgttttgttttctctctgttctgcctttttattgatgactctggggaagcaacaagatcatactactaattctttttcctttttacccattaattcttaagtggaaaccagtcagaggcatggaattggagcacaggaagctggtgtgggtgagagaatttcatgcagaccgcagggaagcttggaagatcatccctgccccaccgtgaccagcaggtctgggtttcagaattcagaggcttgcttcctagaatgtcttgtacagcagctcccttttctgagatccagtttgactaaccctgttctcttccaggaatatataccctgcattactctctgcttacctaacagccgtgacatctctattccgcgtgctagagatttatccgtggtcatctggattggagttctgggaggtggtaaagcctgtctctcggttttacttccacagatggtcatttattgtgtatagagtttatttacctttcagagggcaacccattttcctattttgctgttgtcattggctgttgttggctgttgttgggagaagctcatttcttctctattactgccaacaagctggttttcttgaaggaatacatctgtacaaaatctcctggtttaaggtcagacagggacagtggtgccctcctgttggaatctcacttccgtttttcttgcacgctggaagggaaaggaacaaataaatggacagtgttttcctattttggaaaagtagtttttcagttattttttacttatatttaagatttcttataacatttgatcctttattccctccacattgaatccctcacaactatgacaatcatttacttgtattttttattatttttatttttttattattttattataaaggcaatatttttatagaaaactcagaaaccaaagtaacattacatatgtatattagagtaaaagaaattcttccaatcaggatgactttttctatttctgggttcatatatgttttccactaataataattacctacaaaacagtagtaagaaagcagcatactgctctattgcagagtttcagaccgatcacttataccaatgtactaacactctaaaatagcctttggcttaaaggattataaatccttctgctataaagacacatgcacacatatatttattgcagtactatctacaatagcaaagacttggaaccaatccaaatgcccatcaataatagacgtgttggataaagaaaatgtgacacttacacatgatgcaatactatgcagccataaaaaagaatgagttcatgtcctttgcagggacatggatgacgctggaaaccatcattctcagcaaactaacataggaacagaaaaccaaacactacatattctcactcataagtgggagtcgaacaatgagaacacttggacacggggaggggaacatcacacactggggcctgttgggggttgtggggcaagcagatggagagcattacgacaaatacctaatgcatgtggggcataaaacctagatgatgggttgatgggtgcagcaaaccaccatggcacaagtatacctatgtaacaaacctgcacgatctgcacatatatcccacaacttaaagtataattaaaaaaaaaaaaagccttaggcttaatatcattagagcttgaggcaaatttcaagaactactatctttgtttatttatttaattatggaaactagcttcagacatcagcagagatgatatcctaagacacaggagagcgggggagctgcagggagctccagagaagcctgtctccatgtgtgtttaaatctttcttccccctgtctttctctgtattcttccttctcctcttccttcctttctttactgcagtcttttccttaattagccttcatagagaaccagctgcctttaaaatcattgtttacctatattgaacagtttaatatatgattatttaacaaccatcaatcattgtttatctatattgaatagtttcacgtccagaatggaatgaattgacttctacatatgcggtcctttaatgatttcttaaggaccagtagccctctgcaaaactttaaaagcctctcctagagcaaggcgattgtgccattcttcatcctctgctggctagccgtgttgccacccacttctgcctgctaaacggctcctttcctcaatccctgcctgagtgctacttccttcaggaggactttcttttgcactgctccatcctaccctataactagatgtgatcgcttcttgccacaaattccaatcatattcagtccagttttgtgacacttatagtaatctggcttgtatttgtgtacctgttttattcttcaaataggttatggcctcctaaaggcaggatcaaagtcttactgagtactttgcagctatcatgccttataattaagagttgcaagggccgagtgcagtggctcaagcctgtaatcccagcactttgggaggctgaggcaggcggatcacgaggtcaggagatcgagaccatcctggctaacacagtgaaaccctgtctctactaaaaatacaaaagattagccgggcgtggtggcgggtgcctgtagtcacagctactccagaggctgaggcaggagaatggcgtgaactgggaggcggagctgcagtgagccaagnnnnnnnnnnnnnnnnnnnnnnnnnnnnnnnnnnnnnnnnnnnnnnnnnnnnnnnnnnnnnnnnnnnnnnnnnnnnnnnnnnnnnnnnnnnnnnnnnnnnnnnnnnnnnnnnnnnnnnnnnnnnnnnnnnnnnnnnnnnnnnnnnnnnnnnnnnnnnnnnnnnnnnnnnnnnnnnnnnnnnnnnnnnnnnnnnnnnnnnnnnnnnnnnnnnnnnnnnnnnnnnnnnnnnnnnnnnnnnnnnnnnnnnnnnnnnnnnnnnnnnnnnnnnnnnnnnnnnnnnnnnnnnnnnnnnnnnnnnnnnnnnnnnnnnnnnnnnnnnnnnnnnnnnnnnnnnnnnnnnnnnnnnnnnnnnnnnnnnnnnnnnnnnnnnnnnnnnnnnnnnnnnnnnnnnnnnnnnnnnnnnnnnnnnnnnnnnnnnnnnnnnnnnnnnnnnnnnnnnnnnnnnnnnnnnnnnnnnnnnnnnnnnnnnnnnnnnnnnnnnnnnnnnnnnnnnnnnnnnnnnnnnnnnnnnnnnnnnnnnnnnnnnnnnnnnnnnnnnnnnnnnnnnnnnnnnnnnnnnnnnnnnnnnnnnnnnnnnnnnnnnnnnnnnnnnnnnnnnnnnnnnnnnnnnnnnnnnnnnnnnnnnnnnnnnnnnnnnnnnnnnnnnnnnnnnnnnnnnnnnnnnnnnnnnnnnnnnnnnnnnnnnnnnnnnnnnnnnnnnnnnnnnnnnnnnnnnnnnnnnnnnnnnnnnnnnnnnnnnnnnnnnnnnnnnnnnnnnnnnnnngatctcggctcactgcaagctccacctcccgggttcacgccattctcctgcctcagcctcccgagtagctgggactacaggcgcccaccaccacgccaggctaatttttttgtacttttagtagagacggggtttcaccgtgttagccaggatggtctcgatctcctgacctcgtgatccgcctgcctcggcctcccaaagtgctgggattacaggcgtgagccaccgcgcccggcctgctcttttttgttgttgttgttgagatggagtcttgctgtcacccaggctggagtgcaatggcgagatcagctcactgcaacctccacttcctgggttcaaacgattctcctgccttagcctcccgagtagctgggattacaggcgcgtgccaccacgcctggctaattttttatatttttagtagagatggggtttcaccatgttggccaggctggtctcgaactcctgaactcaagtaatccgtccacctcggcctctcaaagttctgggactacaggcctgaacctccctctctgctcttaaaaaataaatgttggccgggcgcggcagcattttttttttttcaagattacagcgtcagtaatcccagctactcgggaggctgaggtaagaggatcgctaggaccctgggggcggaggttgctgagccgaaatcgcgccattacactccagctttggtgacagagcgagactgtctcaaaaaaaaaaaaaaaaaaaatgcttagtaacaatacgttgtaaacggaaaaaaatcttattttttacgtttagatgcatgagtaccaacggtatgaaatcttcaaataatgtaactcagcgagcagtttaactactgactaggaaaaagttcccttccttgaaaccacatggcacacctctggcctttcccgtgctccatccctccctgtgcggccacttctttgtgcagccaggcactgggctctgagtctaggttggcggactcctctcctcgcctcggcatggaggtggcttctcttccccaagccttgtgcaacaggacccgtccttgtgagggaccagataaacgccccatgctcaaagtcgctcaccctcacctagtcctcactgcttccaatggtgtgcggaataaaagcgatgagcccgaggaaagccatcgtaaacgactgtgattgtctttaagaaagcttgtggcaagataataatgtggtcattttacaacagtaggaactacatgcaaaatcgtctcacttttttccccccctttgaaagttgagttacaataatttaagttgaaaccataaagaactgcttctaaaatgcaaaaaagaccaaagatttcttcagtataccttcagtagtcatttcgaaggacggtaataatttacaagatccccgtagacttttctttttttggccatggttggaagtggggttgaccttaaaacttggtggtttcaaggaacgcttaagtgtgaattaatatgatgtgaagaaataataatagcctcattctcttgcagtctaatcacagccttttccccagccccaggggagggagcctttaataagggtctgtgtaaactgacgccccggcggcaggagtacggagaagcactgctctgacaagttaagacgcaggaaacagcaacccaaagagcagcccccgaaacaaagttgctcagacaaacaagccgatgcagacgagcgccatggccctgctggcgcggatcctgagagccgggctgcggccggcgcccgagcggggtgggctcctgggcggcggggccccgcggcggcctcaacccgcgggcgcacggctcccggcgggggcgcgggccgaggacaaaggcgccgggcggccggggtcgccgccgggagggggccgagccgagggtccccggagcctcgccgccatgccggggccgaggaccctcgccaacctggcggagttcttctgcagggacggcttcagccgcatccacgagatccaggtagcgcgcgccgccccgggagggagccagcccgggctgctgcccagaaggctgacggcgcgggcgggagggcgccagggaggggcgcggggttggggagtcccagggaggggcggcgggcagggatccccgggcactgggcgccgcggtgggttgggggagctggactggggttgtccggttaaggttcgcaggaaggggcgctggggagaggacgccggaaaggcgatccggggtggaggaggcaggaaccgggagcggggcgggggcgttggggaggggtcttcgggaagcggaccccggagaggggcagcaggcagagggagctgaggaacggggccagaaaggaacggctgggaagaggcgggggaaatgggtgtctcgggaggtggcggcagggaggggtcccctggaggggccccagccgggacccctggggaggaggtrgcggggaggggagtcagggatggagtttcggagagtggtagcccgagagaggcggcgggcagggtctccagggactggtcccggggagggacccaggcagggattgcctggttggggaacctggggagggggcgccgcgaagggaaaccaggaatgggactgcggggagggcaccagggctgaggtcccggaggaggagacttggggaggggcagcgggcgcctggtggacgccgccggggcctgggagtggagagctggcgggacccgcggagttggggctgaggggggctgctgcctgsggccggcccgaggggagcgctaggttccctagctcctctaggctctgcggagctcggtgtccttaggtggccgagaccgtgtgtattcatttctagtcctttttgtattttgtaatggcgggggaagaggggacggaggctcggaggctcggggtgccgtaggctctaagccggagttgggggcgacacctggagttcgcgccgggactggaggcagggacgtgggaggaacccaggggtcccagccacccgctagggcgttggggccggcgaattccgcacgcttcccacttggagcctgagtgctgtccttcccacgcccacctccgttgcgcccttcgtggcaggggcactgcacccgagccgcggcggcgccctccgatgccttcgcccatcgtccgcctccccgggtgcccggcccagcacgcactgttatttctgggatgggggcttttggtgtcttccgagaacgcccccttctcctcccacccaggcctgtccttctgcccagagttccggtctttcgagacccttctccatcgaagcctcttctaactacccacctgggcttcagtcattcattcgttccatcagccattcagtcaatgaacgtgagggagaagccccaaccctcattaatggaaaaacgggcgtgcgaggagcaattttaattcggccgggaattaaaatttaatttaattttaatgccaggaagtcccaaccgtccctcctcaagtccgccacgccaaccctatacagttccaaaccgccacccccaccccaatgcttagagggctcaaaaatgattttctttgtaggatctgataagatatcaggatggcaactttcaaatacagtaaaaagtgttttgttatttgctgttgatgggttcaatacagcctgctttctgaagtgtaatttaatttttcttttatccgcccctactgccatctgcttttatcctcatacctcacccagagtttgttccatgggcacaggtttctttgagacggaccgtgttaaagcctgtatccagtcaggatgtgtggcagttcagatgggtattttccattcacccgcccctgccgccagccctcaccctgagctcagcccctcctgcccactgctcagacagcttccttcaccacacccagggccctggggcacggagcagagagtcacaactgactcacttkctgccttctcaccaagcgcacacaggacctggagagtaaaagaaataaaggaaaaagttctttccctttactctccaggtggcactaccccaaccctcaaatatggtacttgtggggactctcaccttcctgcagcccctctgaggactcccaatttcgaacacatggttctagaaaaaccctctcttcccgctctccaggttgctcattgttctgtggcccatcacatccagttcacttgygctccccttgcaatcacagaatgttagctaaacaagggctcttagtgttcacctacatagctcacctctcattttacagatggaaagagttgggtggttacctaagcgacttgcctaaggtcaggcagctggtgattggcagagtagaaatcataatttgggtcactagatgctatttagggtgtggtagagcagcaggatggccgaaacaggagtcatgtcctccaatgctggccctctgcagccacctgtggagccttgggctagtcactcattctctctgcacctcagttttctcatccgtaaaggagattagcaatcgccattcctctcatgggttatgataaggtcaaatgagcttagtgttatgaaactgtaataataacaaataataacgatcagtatttctagaactcttttcatgtgccaggcacagtttcargtcttacgtgaaacttatttctccattttttgggtgaggaaactgaggcatagtgggacctaacttccaaaggttattcagctagtaaactgtgagcccagattcaaactccagagtctgtgctcttaacatccaagcaaactctaagtactgtgcctgactgtatagttccatggcccaccaccagaaagtgatgaaaactatctgtatcatttctacctccagttcccttgtgctgattgtacccaattcagtagctggatttgcttgaggagtggcccatttcccagtagttcttgttaccagtcattccttcagtgggcccctttagagacctgaactctttgggggccacttatttgttaggcagaagtgaccccttggagatggactcattccagtttagtctgaatgtcttcattttcaggtctccagaaggagtgagtataagagtagagaaatgacagtgctcctggcccactgtttctgagattgagagctggagtggtgagaaagctgggcagataccaaagagagtcttagtaactttccccagcccagccctgtctgtgtcatgctgagccatgttagaggctcatcacttttgtgttttaactgaataatttagtctatttacatttattgtgatttctttttatgcagggagtaacagctttcttaagatataattaacatatcatataattcatccatttgaagtatacaaccatcaccgcagtcaacttgtagaacattttcatgacctcaaaaagaaatcccatatccatcagctatcacccccaactctcctattccccctgctttaagcaaccaccaagctactttctgtatctatagattggcctattctggacatgtcataagtggaatcatgtaatatgtggtcttttatgggtggtttctttcactttaaacatttcagtataatgtttttaaggttcactcatgttgtagcatgtatcagtacctcattctttttatggacaaataatattgcagcgtatgactataccacattttgcttatccattcatcagttcatagacatttggattgtttccaccttttagccgtaatgaataatgctgctgtgaatttttgtgtgtaaggttttgtgtagacatgtgttttcatttctcttggatatgtatctaggagtggaactgttgggtcaaatagtaattctatatttaaccttttgaagaactgccagactgttttccagagtatctgcaccattttacatccccaccattatcataagagggttctgatttttctacatccctgtcaacatttgttattacttgtccttttgattatggccattctagtgggtgcgaagtgctatctctccctgatgactgatgatgttgagcatattttcatgtgcttatttaccatttgtatatcttctttggagaaatatccattgaaatcctttgtccagtttttaattgggttcttttctctcttcttccttcctccctccctccctctctctctccctccctcccttcctctactgatttgtaagtttctatatattctgggtacaagtcccttatcagatatgtgctttgcaaatattttctccatccgaaggttgtttttgctttttatttttacattttatttttattttttaatgagacagggtcttgctatgttgcctaggctgggctcaagcaatccacctgccttggcctcccagagtgctaggattacatgcctgagccattatggccggccttgttttcactttcttaatagtgttctttaaagcataaaagttttaaattttgatgaagtcctattatcgatttttttcttttgttacttgcactttagggatcatatcttaagacattatgccaaacccagggtcatgaagatttacccttatgttttcttctaagagtttatagttttagcatttacatttagagctttgatccattttgagataatttttttatatagtgtgagaaaaaggtaaaaattgattctttgcttgtggctatccagttgtccctgtgccatttgtttaagagactattaaatccttttcctattgaaagatcttggaactcttgatgaaaatcagttgaccatagatgtttgagtcttaaatctaagccaatgattatgccattactgcactgtcttggttactgtagctttgtactaagtctttttttttttttttgagatggagtctcactctgtcgcccaggcatgagtgcggtggtgcgatctcagctcactgcaagctccgcctcccgggttcacgccgttctcctgcctcagcctcccgagtagctgggactacaggcgcccgccaccatgcctggctaatttttttgtatttttagtagagacggggtttcctcgtgttagccaggatggtctagatctcctgacctcgtgatctgcccacctcggcctcccagagtgctgggattacaggcatgagccactgcgcccggcctgtactaagtctttttttttttaatttcctctaaaaaaaaaaaaccaaaaaaaaamaaaaamcaaaaaacggatacatgtgcagaacatgcaggtttgttacataggtrtacgtgcaccatggtggtttgctgcacctattgacccatctaagtttcctcccctcaacccccaccccagcaggccctggtgtrtgttattcccctatctgtgttcatgtgttctcaatattcaactcccacttatgaataagaacatgcagtatttggttttctgttcctgtgttagtttgctgaggatgatkgcttccagcttcatccatgtccctgcaaaggacatgatctcattcctttttatgactgcatagcattccatggtgtatatgtgccacattttctttaaccagtctatcgttaatgggcatttgggttggttccatgtccttgctactgtaaatagcgctgctgtaaaaatatgtgtgcatgtgtttttatagtagaatgacttatattcctttgggtatatacccaggaatgggattgctgggtcaaatggtatttctggttctagatccttgaggaatcaccatactgtcttccacaatggttgaactaatttacattcccaccaacagtgtaaaagtgtttcagtttctccacagccttgccagcatctattcctgastttttagtaatcaccattctgactggtgtgagatggtatctcattgtggttttgatttgcatttctctgatgatcagtgatgtatacattatacattgagctttttttcatgtttgttgtctacataaatgtcttcttttgagaggtgtctgtttatattctttgcccaatttttgatggggccatttgtttttttcttgtaaatttgttcaatttccttgtaaattccagctattagacctttgtcagatgggtagattgcaaaaactttctcccattctgtaggttgcctgttcactccaatgatagtttcttttgctgtgcaggaactctttaatttgattctagttgtcaattttggcttttgttgcaattgcttttggtgtcttcatcaggaaatctttgcagatgcctgtgttctgaatggtattgcctaggttttcttctagggtttttatggctctgggttttacatttaagtctttaattcatcttgcgttaatttttgtataaggtgtaaggaaggggtccagtttcagttttatgcatatggctagccagttttcccagcaccatatactgaataggagttcctttccccattgcttgtttttgtcaggtttgtcaaagagcagatggttgtagatgtgtggtgctatttctgaggtctttgttttgctccattggtctatatgtctgttttggtaccagtaccatgctgttttggttaccgtagccttgtagtatagtttgaagtcaggtatcgtgatgcttccagctttgttctttttgcttaggattgttttggctatatggggtcttcaattccatatgaaatttaagktttttttttttctaattctgtgaagaatgtcaatggtggtttgatgggaatagcattgaatctataaattactttgggcagtatggccattttcacgatattgattcttcctatccataaggatggaatgtttttccatttgtttgtgtcctctcttattttcttgagcagtggtktgtagttctccctgaagaggtccttcacattccttggtagctgtattcctagatattttattctctttgtagtgattatgaatgggagttcattcatgatttggctctctgcttgcctattgttggtgtaaaggaatgcttgcgatttttgcacattgattttatatcctgagactttgctgaagttgcttatcagttcaagaagtttttgggctgagatgatggggttttctaaatataaaatcatctcaactgcaaacagagataacttgacttcctctcttcctatttgaatatgctttatttctttctcttgtttgattgccctggccagaacttccaatactatgttgaataggagtggtaagaaaggacatccttgtcttgtaccagttttcaaagggaatgcttccagtttttgtccattcaatatgatattggctgtgggtttatcataaatagctcttattattttgagatatgttccatcagtacctagtttattgagagtttttaatgtgaagggatgttgaattttatcaaaggcgttttctgcatctattgagataattatgtagtttttgtccttggttctgtttatgtgatggattacgtttattgatttgtgtatgttaaaacagccttgcatcccagggatgaagctgattgatcgtggtggataagttttttgatgggttgctggattcggtttgccagtattttattaaggacttttgcatcaatgttcatcagggatattggcctgaagttttcttttttattctgtctcttcctggttttggtatcaggatgattctggcttcataaaatgagttaggggggagtcccttcttctcaattgtttggaatagtttcagaaggaatggtaccagctcctctttgtatktctggtagaattcagctgtgaatccatctagtcctgggctttttttggttggtagactattaattactgcctcaatttcagagcttgttattggtctattcaggggttaaatttcttcctggtttagtcttggtagggtgtatgcgtccaggaatttatccatttcttctagattttctagtttatttgcatagaggtgtttatagtattctctgatggtagtttgtgtttctgtggggtcagtggtgatatcccctttatcattttttattgtgtctatttgattcttctctctctccttctttattagttaattttttccaaaaaccagttcctggattcattgatttttttggagggtttttcatgtctctatctccttcaatttttctctgatcttagttatttcttgtcttctgctagcttttggattagtttgctctcgcctctttagctcttttaattgtgatgttaggctgtcaatttgaggtctttctagctttttgatttgggcatttagtgctataaatttccctcttaacactgctttaggccgggcgcagtggctcacgcctgtaatcccagcactttgggaggccgaggtgggtggatcacgaggtcaggaggtcgagaccatcytggctaatacggtgaaaccccgtctctactaaaaatacaaaaaaaaattagctgggcgtggtagcgggcgcctgtagtcccagctactcgggaggttgaggcaggagaatggcatgaacccgggaggcggagcttgcagtgagccaagatagcgccactgcagtccagcctgggtgaaagagcgagactccatctcaaaaaaaaaaaaaaaaaaaaaaaaaaaacaaaaaaacactgctttagctgtatcccagagattctggtacgttgtctctttgttctcattggtttcaaagaacttcttgatttctgctttaatttcattatttacccaggagtcgttcaggagcaggttgttcaatttccatgatattgtgtgcttttgagtgagtttcttaatcctaagatctaatttcattgcactgtggtcagagagactgtttgttatgatttcagttcttttgcacttgctgaggaatatatgcggtcaattttaattgacaaataagtgccatgtacactgagaagaatgtatattctgttgatttggggtagagagttctgtagacatctactaggtccacttgatccagagctgagttcaagtactgagtatccttgttaattttctgtctcgctgatctgtctaatattgacagtggggtgttaaagtctcccattattattgtgtgggagtctaagtctctttgtaggtctctaagaacttgttttatgaatctgggtgcttctgtattgggtgcatatatattcagaatagttagctcttcttgttgaattgttccttttactattatgtaatgcccttctttgtcttttttgatctttgttggtttaaagtctgttttgtctgagactaggattgcaacccctgcttttttttttttcacttttcacttgctttgtaaattttcctccatccctttattttgagcctctgtgtgtctttgcctttaagataggcctcctgaatacagcacgctgatgggtcttgactccttatccaatttgccagtctgtgtcttttaactgggggatttgcccatttacatttagggttagtattgttatgtgcgaatttgatcctgtcatcatgatgctatttgcttattttgcacactagttgatgcagtttcttcgtagtgtcattggtctttatattttggtgtgtttttgcagtggctggtactggtttttcctttacttatttggtgcttcttttaggagctcttgcatggcagacccagtggtaacaaaatccctcagcatttgcttttctggaaaggattttatttctcctttgcttatgaagcttagtttggctggatatgaaagtctgggttgaaaattctttaactatgttgaatattggcccccaatctcttctggcgtatagagtttctgctgagagatccactgttagtctgatgggcttccctttgtaggtgacctggccttcctctgtggctgctcttaacagtttttccttcatttcaaccttgaagaatctgatgactatgtgtcttggggttgatcttaatgtggagtattttaatggtgttctctgtattttctgaatttgcatgttggcctgtcttgctaggttgaggaagttctccttgataatatcatgaagtgtgttttccagcttgtttccattctccccgtctccttctggtgctccagtcgattgtaggtttgctgtttttatgaagtcccatatttctttgaggctttgtttattccttttcattcttttttctctattcttgtctgcatgtcttatttcagtaaggtggtcttcaaattctgatatcctttcttccacttggtcgatttggctgttgatacctgtgtatgcttcacgaagttctcacactgtgtttttcagctccatctggtcatttatgttcctctctaaactggttattctagttagcagttcctctaaccttttatcaaggttcttagcttctttgcattgtgttagaacatgctcctttaggtcatcgcagttttttattacccatcttctgaagtgtacttctgtcaattcgtccatctgatcctccatccagttctgygctcttgatggagagacattgtgattatttggaggagaagaggcactcaggccttttggttttcagcatttttttgttgattatttctcatctctgtgagtttgtctagtttcagtcttgaggctgctgacccttggatggggtttttgtgggggcctttttttgttgttgttatcaatgctgttgttgtcgctttctgtttgtttttctttcaatagtcaatccctcttctgtagggctgctgcagtttgctgggggttcacttcaggccctattcttctgatttgctcctgtgcctggagatgtcactcaaggaggctgaagtgcagcaatgatgggtgcctgctccttcttctgggacctctgacctcaaggrgcatcaacctgatgccagtaggattgcttctgtatagggtatctgacaacccctattggagggtctcacccagttgggtggcatggggagcaagaaccttttaataaagcactttgtcccttggtggggagggtgtgttttgcttgggggaaacccactagtctggattgcctggattcctcagaactaccaggagaagaggctaaatctgctggtccgcagagactgtggccaccccttccccaagggctcaggcccagggagatcagagttctgtccccgagcctctgactggaattgttggagatcctgctgggaatccccagccactgaggaaggatggatcagggttagacctgaagaggcactctggctgccaactgccacagctggtgtgttgagctgtggggataactcttgggaccaagccatccagcctccctggctccagcaggggaaaagtgcagcctggagctatagaaatgggtgccacccttccccaacccagggagcttagcctgttggcagttgtgagtcccagtgctggctgctgcccctcccccaaggagctcaaattacttagacagcaggcagccgcagctggtgctggtcgcccatcccctcaggagttcagtaggcttaaacagattccagctgagaggctgtaggaatctgtgcataccagggttgggatgcttggctctggtggcatgggttcgagagtgggatcttctgacctgtaggttgcacagttctgtggaaaaagcacagtttccccagctgggtagccygctcactcaccacctcccttggctggggggagtgggttcccttccccgtgtggctyccaggtgggccactgcactacactgttcttcctkctctccgtgggttatgccagccttctagtcaattttgatgagagaacctggataccctggctgccagtgaaggtttcacatgcttattatgttttttttgatgggagcctctgagcaccactgcttctagttggccatcttggcccctctcccatactaagtcttgaaacaggaaaatgggggtccaccagctttgttcttttttcgagattgtttaggctattctgggtctcttgcattttcatatgaattttaggatcagcttatcagtttctacaaagaagcccactggaattatgatagggattgtgctgaatctatttatacactttgaggtgtatttctttctcaacaatattaagtcttccagtccatgaacatgggatatcttgccatttatttcatgtcttgccatttatttcaggcttctttaaacaatgttttgtagatttctttaaacaatgttttgtagatttctttagacaatgttttatagttttcagagtataggttttacacttctcctgttaaatttatttctaagaatattattatttttttttttgtgacagagtcttgctctgtcacccaggcctgagtgtggtggtacaatcttcactcactgcaacctccacctcctgagctcacgtgatcctcccacctcagcctcctgagtagctgggactacaggctcacactgccatgcctcgctaatttttgtatatatatgtattttttgagatagaatttcactcttgttgcccagggtggagtgcaatggcgcagtcttgcggctcactgcaacctctgcctcctgggttcaagcgattctactgcctcagcctccgagtagctgggattacaggtgcacaccaccatgcytggataatttttgtgtttttagtagaaatggggtttcaccatgttggctaggctggtctcaaactcttgaacccaggtgatcccctcgccttggcctcccaaagtgcagagagtacaggcatgagcctttgcacccagccatgtattttttttagagacagaattttgccatgttgcccaaccttatcttgaactcctgtgctctagygatccacccacctaagcctcccaaaagtgctgggattacagacaggcatgagccactgcagctggtcaagtattgtattctttttgatgtattgtaaattgaattgttttttaaatttcattttggattgttcactgctagtgtatagaaatacaattgatttttgtatactgattttgtgtcctattgaacttgtttattagttctaatagttttttagtaggttccgtaggattttctgtatgtgagatcacgtcatctgccaatagagatagcctgacttcttcatttccaatccagatgtcttttccttcattttcttgctgggagtcagttttagaggctcgttacagactgtccacagagggcttgctctgcagagttggcttggtactgcttgggtagagctgttgggcccatggaaaggggctggcagacagggctctgtttgctctggacatttgtctcttataatgacatttctctcttgttgcttcacacagctaaggtagttttaaaaacatatccctaaagaataagaaaacttccatgatcatgcctgtaatcccagcactttgggaggctgaggcaggaggatcacttgaggccaagagttcgagaccagcctggcaacattgagagacccctgtttctacaaaaaataaaaaattagctgggagtggaggtgtgcacctgcagtcctagctacttgggaggctgaggtgggaggattgcctgggcccaggagttggaggctgcggtgagctatgtttatgccactgcactccagcctgggcaacagagcaagaccctgtctctaaaaaacaaacaaacaarcaaacaaacaaacggaaacaacaaaaaagagatggttatgtgaaaacatgtttatctcagcaatatgtaaattactgctctgattcagtgctgtgttagatagcacttccckctgccccaattttctgctcctctagcacacaggatgtttatgttaaaggtatatcatatctatgtattttttccttttttgatttctccatggtattgcagcagaagcacacacgggaatatggaaaaatcttcaagtctcactttggtcctcagtttgtagtatctattgcagaccgcgatatggtggctcaggtgctccgggcggagggcgctgcgccccagagagccaacatggagtcctggcgggagtaccgagacttgcgggggagagccaccgggctcatctcggcgtgagtatgtgggcccgggctgagccacgggctggagggggagctcagggggaggccccctcctccaaagctgagttcctaaaagccagctcttaaaaaagcacagaacccccccatggaatgatatcagacagtctccttgtgcgatctcccagacatgagagccctgctgggctttctggctcctcctccgtgcagagttgtcccgtcaggagccaggaggggcgacgctggctccgtggtgggcagagcgcttcggaagcagggctttgtggctttgggagtccattcagtgataaccgaggcagacaaaactcacagcgcccttgtctgtgcacagggaaaggaggtggtcactatttcaggaaaatccctttgacgaggggctaagaacctccagccttggtcgccacgtggtgattttcctgtctcatagcagactgtgattattcattttgaaccagcgtcaccaacacctctgtgccttccaagagatcgtggcccgcggccaggcagggaggcccagggcgcctgcagatgccccggtccaaatccccatggggtgggacttctgtttgcagctcttttgatatctatgtccttatacataaattggggagaaatacagccaccaatttctcaagtaagataaataagaatcgtgaccagatgtcaccagggtccctcaatttccgtcctgggggaaataattaaacagctcctcctggatgttcaggcctagaggggcccgaatgctgaggcagaatctctctgctgtctgccccgttagctgcaggctcaggagcctgtgtgggtgcctggacccctcttcggctgagayggagagaggcggtgctggtgacttcagcacagtggacagcaaagggaagggcagtgcctaggcccaggcgccgggctggcttagcttgggtcctccaaagtccatctggaggcaaggctttgagtgcaggtggtctccttgggaacgcgaaagtggagcagggttgggaggcaagccatgcggaggtgtggaggtgtgggtgacgctcgtgggcacttgaggctcagtcctgccacgaccctctgagaaactgcagaacactcctcagacctccaaggggttccctcagcgtcctgccttcactgggagcggtgtgctgggcctgctacctgggtgctctccgagtgcagccaggagccccaaggccccacaccctggtaacaagctgcagtccctctttctttcccacaccctggtaacaagctgcagtcttctttctttctttctttctttctttctttctttctttctttctttctttctttctttctttctttctttctttctctctctctctctctctttctttctttctttccttctttctttccttcctttctttctttctttctttctttctttctttcttttctttctttcttttttctttctttttctttctttcctttctctctttcttttctttctttctctctctctttcttttctttctttctctctctctttccttcctccctcccccctccctcctccctccctccctccctccctccttccttccttccttccttttctctctctctctctctctttctttcttttttttttgagatggagtttcgctctgtcgcctaggctggagtgcaatggcgtgatcttggctcaccatgacctctgcctcccgggttcaagtgattctcctgcctcagcctcccgagtagctggaattacaggtgcccaccaccacacccggctaaatttttctatttttggtagagatggggtttcaccatgttggccaggctggtcttgaattcctgacttcaggtgatccacccatcttggcctcctaaagtgctgggattacaggcatgagccaccatgcctggccctctttttcttttttaatatcagtacttacttcatttatatatacatatgtatgcatatatatatatatttttcttttgctaattagcaatctcatttctttattacaatattatttcaagattttttaaaggaagtcgtattacttttactaaagattattacttaccactggtagttttttccttaaagtttgcttcaaaggcaagagtgtaagaagctctaacaggctccagggctgcagttattaacttctctctccccagcaaaaagtctttcctgtcttaatyctactttgttgggcagctcttgttgattctttatggctgaaattttttctagaggttccttgaattctttcccagaatgtcagtgtaagtaagatgatttgaaactcacttgattcttctagggagggtgaacagtggctcaagatgagaagcgtattgagacaaagaattctgaaaccgaaagatgtggccatttattctggagaagtcaaccaagttattgctgacttaattaaaagaatctacctcctcaggagccaggcagaagatggagaaaccgtgaccaatgtcaatgatcttttcttcaaatattcaatggaaggtgaggtggaatcagcaggtgggaaggagggaagaatggatacttgccccaaacctgcagatgtcatcttggatcattccctgggtcccaggcagtgtgctaagtctgggacatacatgcatgtcacctccacggtgctaacgtgaacctggtgtgaaccaccgttgaccaatgaggaaactgagactttttttttttttttctgagatgaagtcttgctctgtcacccaggctggagtgctatgatgtggtcttggctcgctgcaacctctgcctcccaggttcaagcgattctcctgcctcagcctcccgagtagctgggattacaggcacctgccaccactcccggctaattttttgtatttttagtagagacagtgtttcaccatgttggcaaggctggtctcgaactcctgacctcgtgattcgcccgccttggcctcccaaagtgctgggattacaggcatgagccactgcacctggctgaaactggacttaaaaaagaacttgcccaatgccacacccccatccctctttttagaggcagaaagttagtttcaaattcaggtcttttaaactcaagaagccatgttcctaattactaatttacatgttcaaaaaaaaaaaacattttgtttgagcataatttttaaaaaggagtgaagttgagagggcatctacttcaaactcattctagcttttagtcatattgaatgagtggtacattcctgttcaaatagcaataccaaaaaggcttcagtgaaggtctccctctttcctgaatgcagcaaaggtcactagtctctcatgtatatgtcaagagatgttttatgcacatacagaaaaacgcatgtgaatattctttttatttttaaacaataaagggtagtacaccaaacatactgttctgcaccgtgctttctctttacttaagaatgcatcttggggctgggtgcggtggctcacgcctgtaatcccagcactttgggaggccgaggcgggtggatcacctgaggtcaggagtttgagaccagtctggccaacatggtgaaaccctgtctctactaaaaatacaacaattaactgggccatggtggcgggcacctgtaatcccagagacttgggaggctgaggcaggagaatcgcttgaactagagaggcggaggttgcagtgagccaagaccacacaattgtactccagcatgggtgacaagagtgaaactccatctcaaaaaaaaaaaaagcatgttggtctaacatggtgatgtttgtgtaaaaaaaaaaaaatagaatgcatcttggaggactttctatcagctttctcatcttttttaaaaaaagcttaccttcaactttcactcaagttagctttgcagagttctgatgttaattttctctaaaattagtaacaaaatcatcccagaagtgattggtaaatacagttcacagctctgcccgacacggattcatccaggccacttctgctgcgcctttagctctccaggcctgggctctgcgttttggccaggaggagtcacttttcaattcctcaagttgggcaagtggctggaaggcgatccccagtggccaggtggggcagggagaggccatgtgaggtttgccgactccttcctgagaggagggtgttgggggagagcagtgacacgctcggtgattgtcccctccccagggctcatcatttcagacctgtgctccagatctgtcccagggtcctcctctgcagccttagccaagctacttaaactctcagagtcttcgaatttcctccagagagtgggcttcttcatctgtgcctcccagggctgtggggctccttaggtgaagcagcaacagcaccacctgtcagccctaaatgccagcaccctgcagttcaggatgcagagaaatcctcagagggacgatgcctcattcatgaaaggcacctggaccacgtttgaaagttgcatttatggcccaacattgcctgttggtatggtaaataatctagaagagggttttcaaattctctttcctgtctaggagtggccaccatcctttatgagagtcgtttgggctgcctggaaaacagcatcccacagctgactgtggaatacatcgaggccctggagctcatgtttagcatgttcaagacctccatgtatgcaggcgccatccccagatggcttcgccccttcatcccaaagccctggcgggaattctgcaggtcctgggatggactcttcaaattcagtaagagaagaattgagagcaccttttgcagaagcaggttgacctgccgtgttgtgtgtctaactctcatccagacaatgggtgaccatagcagaggatgcctagatgtagtcacgtgttagtttttggacccataacttttggattttttttttttttgagacggagtctggctctgtcrcccatgctggagtgcagtggtgtgatctcagctcactgcaacctctgcctcctaggttcaagtgattatcatgcctcagcctcctgagtagctgcgattacaggcacctgccaccatgcctggctaattattttgtatttttagtagagatggggtttcaccatgttggccaggctggtcttgaattcctgacctcaggtgatcacccaccttgacctcctaaagtgctgggattacaagtgtgagccaccacgcctggccatggatttgtttttcaaagaagcaaaaagcatgtgggttgtgactacaggtaacatgatcagttttttcattttaaaataatttttattttcactagcatgctagcagggacaggtacaagtaaatgtccatgcaagatgatgtctttactccaaataaattggtcagtgcttaaaatgtagagtttcaggtccacgcacattcatttgaatgttacaatttttgttcaaatccaaggtgagattacaaagagatttgttttcttatgtgactaaaatttttactataaaagcattgccaaaaataaagaaattattttcaaaatgcttagaacaatgttctagagcaatgctaacactgaataaagtgtttcatggtgtcttttcaagatcaatatttaggctgggtgcagtggctcacgcctgtaatcccagcactttgggaggccgaggtgggaggatcacctgaggtcagtagttaaagaccagcctggccaacatggcgaaactgcgtctctactaaaaatacaaaaattagctgggcgtggtggcgcgtgcctgtaattccagctacttgggaggctgaggcaggagaatggcttgaacccgggaggcggaggttgcagtgagccgagatcctgccactgcactccagcctgggccacagagcgagcctctgtcttaaggaaacaacaacaaccacaacatttatttgaatatagaagtcctgaagtctgtgctgtatggtaacatcccagataataatgtgtggccttttcccctccactcattttctcttctgaaagtgtggtagaaaaaaataaaagagtttgcattttgttactcatattatataaataatttatttggctattggattagtaaagcaaacatctgcaaatatcctacagcttatttttaaaaaggaagatacgtttagcttgtcttttaacttttcattcatttacataagcaagtgtatgagtgaaactcccaggttgacgttagataaattgggtttccttaccctctgtcacctgccactggtttagttaagctactgggaggacagarggctttgagactgaaaagatgattctcaacccaaactcctttcaaaagaaatactgttttcaaacaggccaaattcatgttgacaacaagttgagggacatacagtaccaaatggaccgaggccggagggtgagcgggggacttctcacatacctcttccttagccaggctctgacgctgcaggagatctaygccaacgtgactgagatgctgctggccggcgtcgacacggtgagtctgggggtcctgttctcagcaagcaacacacgataaccccttcctcatcacctcatggacgttgtctacttttttggagcgggaggatggagttttactctattgcccaggctggagtgcaatggcatggtctyggctcactgcaacctctgcctctcaggttcaagtgattctcttgcctcagcctccagagtagctgggattacaggcgcccgccaccacttccagctaatgttttgtacttttagtagcaacgggggtttcaccatgttggccaggctggtctcgaactcccggcctcaggtgatccacccgccttggcctcccaaagtgctgggattacaggcatgagccactgcgactggccgttgtctacttttaaggcagatttgtttagcacacygttcatgtttgtactaggcctgctgcactgctggggggctccaggaggagaaaactctgtgtatgcagtcacgcctcacttaatgatgcagatttgttctgagaaatgcgttgttgggtggtcctgtcattgcgtgaacatcttagagtgtatttacacaaacctagatggtagcctaccacatacctaggctgcacggtagagcctattactcctaggctacacaactgtacggaatgttactgtactgaatactgtgggcagctggaacacagtggtaagtatgtgtgkatctaacatacttaaacattggcaagctacagtacaaatgtggctttataatcttatgggatcaccattgtatattgggtccatcattgaccaaaacatcactatacgatgcatgattgtatattaaatgtaaggtgcataatgatttctgtgaaaagcataaccaaaattccattagcacacacacaaaatgataataaatgtttaaagtttacaaatcattcctgatttgtaaacattttgtcattgtttcataatttcatacatgaagagggtacagacattaaaaaccttattagttatcatttaaaatattccaggccatggaatttatttataaagccaaraattcatttcattcactccccaatttgttctataaagccaacataacttcaaaaccaaaacctgctaaagagagtgtaaagaaagtaaactaaagcagtttggttgatgagtgcgtgtgtgtgtgtgtgtgtgtgtgtgtgtatcaacaaattccctgtgaatggagcccagtagcatggcagatcaatgatacactgggaccagggagggttcatatcagaatgagacagagcactgcccattaacctggggggaacccacaggctatccgatgggaaaggaagaggcagaccagcatgtatactgtgtcctgtgagtaagatgcagcggcaccgccccctcccggctgtgtgcatctgcacatctgtccgtgactgtgcgaacacagagcagcgcgtggagggaacacactagatagttaacatgggtttttggctggctgggggtggcatggtccggggggaataaggagccaagttcctttcaaaagcacatgtgtaatatgatacaattaataggatacgtgtgaaaatgatcgccgtgtaggtacaggtgaaagcagttgtaaaatttgctaaaaggaaatggcaaaacagggaggagctaggctgatgctttcagtgggtggaagataatgaaatttctggctggaaactggggaagctgcgggctggggtgctgctggtggtcgggtggaaagagagaattaagattgcgtgacgcttcgctgtttccaaagcattgcacgcacaccctgcctgtctcacagcttcctctaaggtaggagtcattgacttcattaacaggtggggaaactaaacaaccaagcccatcatctcaaagcttttcctttgcacgggtgcttcccggccttgaataaggcacgccccgcacagacctacatcttaaaggggcaaaaaagcctcaaggctttatttttattgtaatatcacttaagcatgtaaaagcgaaaaacaaaacaaaacaaaacaaaaacaaacccacacagcataaactccttattyttttggattttgtgcaacaataaaacaaaaagtatatgaactaaatgcaaactaaatgatgcaatcaatgagaattytaattaactacctgaatgtgatggtgtggattcgctcaaattaagacaccacttgaaaggtgaaraaatcaatgaatggcttcgtcgctgagcttgtgcctcctgtcccctggtggtaactaagaacatcacaatgaggtggcattcagaaggaagctgttccttttagcatcctacaatagaagccagggaacaaattcttacaacttcatactgatttttaaaaattagtatgattttattgcggtataacttatgcatagtcaactccatttaaactgcataatgcgatacagatttttgacagatggaatcatttatgaaaccactgccacatttttctaaacattgatgagaatggaatcatatagcatgctgtcttttccatctggcttcctgcactcagaagaatgactcaggttcattcatgtggtggcatagaacagtaattgattcttttttattactaagtagtattccattgtatggatataccacattttttccataaaaatgtgatctaaatagaaattttctattctcttgataggaagcatctaagtaatcttttataatttataagaccttgcacattatattatatatacaagagggctgccctctaaaacacgtgatatcttctacaagaaaatgatatcaatattgcctgcttaaattagttttttttttttggtgaaagagaaaggcctttatactgtggcatttccttgtttactagagagtgaaatgtagtcccatagatgatactattgattttagcgaaaatcttgggacctacgagaataaaacaattattttcaataagtagaaaggtttgagaagaggtataaaaaatgacatggctgaccgggcgtggtggctcacgcctgtaatcccagcactttgggagacccgaggtgggcagatcacaaggtcaggagttccagaccatcctggctaacacagtgaaatcctgtctctcctaaaaatacaaaaaattagccgggcgtggtggtgagcgcctgtagtcccagctactcgggaggctgaggcaggagaatggcatgaacccgggaggcagagcttgcagtgagccgagatcgcgtcactgcattccagcctgggcgacagagcgagactccgtctcaaaaaaaaaaaaaaagacactgctttgcatagacgagttattgacttgctctgtgtggaccttacttgatgaaggcaggacacgatggctaactagtgatctcctgtgcactccaatctctagattagggcagccagagtgggccgggcccagcatcctggggatgccggggggcagcctgaggccctttctggcacacaccgagcaagccctgcaaagaaggtcacacaaagtcccagcagatcctccaggctccacggcatccctgacatattgctcttcagtgattaaaaaaagctccaggatcatttttcctgtggctcttcatgacaggagcacatgaatcatagagtcaatgtcacttgccaaatacgttcagttatttatttatttatttatttgccatgaattaaggaaacagtctttcgtttttagtaagacattaggtgctatatggaattggatgagtttgactttgtgctgtgtgtattcccaggggacttcctacctgccaccgcctctgtttcagtccctggtgttactcactgcctgcctgtgtctgccactttctctccttagacgtccttcaccttgtcttggackgtgtacctcctggcaaggcacccagaagtgcagcagacggtgtaccgggagattgtgaagaatttaggggaaaggcatgttccaactgcagctgatgtccccaaggtcccgctggtcagagctctccttaaggaaaccctgaggtaaaaggctcgccagaatccgtcaacaaactgtgtcccttaggtccctggttctctatcacaacaagtcctccaaatgcccccccggctgacctgttcaggatgaggatgttcgtgactgttattttttctctgctcttgtcagaatagcagaaagaccattctgttttatgggtcgacataatccttgttctctgtaaagatctttgggccaggcacagtggctcacgcctgtaatcccagcactttgggaggccaaggcagattacctgaggtcaggagttcaagagcagcctggccaacatggtgaaactgcgtctctactaaaaatacaaaaattagcagggcgtggtggtaggcacctgtagtcccagctacktgggaggctggggcaagagaatcgcttgaagttaggtgatggagccaagattgcaccagtgcactccagcctgggcaacagagcgagrctctgtctcaaaaaaaaaaaaaaaagaaaaaagatctttggagcagtcattgaatattgtccctgctttagccaattggcttactgggggtttcccaaaatgttcctgggtcaatggcctttgactttgttcctctgaagataacacgaaacaagatcgatttgttaggaaaatagtttgrcctgttcagctgatttgcagacctggatacaaacctcatggttcttgagtgaatgttctcatctgggtttagacgccacccagtgaggctcaattactcccagacagggctttcctgacaaacagaaaagccggagggatgtgggttgtcctgggttgaggggatggtttgggtaggaggtgggattagggacggattacatcccttcccccaaacacggcatcctctgtgaggaaatgctgcgacaaaaagcaaagcttgttttctgcagtatatactaaagaattctttcaaagctgacttgataatgaccgtcaacctatatagcatgctgttgaacctcaaaattaaaaaaaaagaagcagctggctgtggggtttattggtatttgtcaattaaagttttattcagggttttctgagataatcygatcgccgaagtatcttttctccaaatgcatttcatggggccttaagtcctatgaactattccttgataaagtggtcccgtggtcacrtaaaatattagaaacttggaatttccctcctgggaacacaatggcatgtgaaaggcttggctttgtgttttgcaaatgttttgctttgggagtcttttccacattcctcagaatactcgctggtaaagcaagccaacaaagaagcagcaaaggtccttgcaaaatgtttcagttgaaaatgtaccatgtgttactttttaagaatttttaatggaaatgggaatatatccagggttctgaacgttcaataaaatactgtgaaagtcaccacgccattcccgtccccrytggctcttttccaggctgtttccagtgctgccagggaacggccgggtcacccaggaagacctggttattggcgggtatctgattccgaaaggcgtgagtttggggccatgggkgtggccaggccttgcgggtcggggttgaattggaatctgcttctaccttcaggaagtctttgtccctaagcagagatcaataggtttccttttcttttgcatgtattttaagatgaagatggggtgttgggagaaaggaagggaatggtgtgatctcactgctctggaaacttactgctcaccagcaaggcagcccatgctccttggcctgctccccaggccgtgtggaagtggccagtcaccgctgggrgtctctgaagggctcgacggtcttctcagtggctgcagtgacatttggggtgcagtgtggagtgggaaggggggagcggctgccatcctgggtgtgartggacccgggcggcccccaggcgggagcaccccgggagactgtccggctagggctctgggccctgccctgctcttgagtgattctgccccttwtcccttttctgtcatccctgatttcctcagacccagctggccctttgccactatgccacatcgtaccaggatgagaacttccctcgggccaaggagttccggcctgagcgctggctgcggaaaggagacttagatagagttgacaattttggatccatcccctttggtcatggggttcgcagctgcatagggcggagaattgcagaactggagattcacctcgtcgtgatccaggtagggcgtggaggccaaacgttggcctttgggttcggcctctttctactgggcacaacaggataaagacttccaggttgaaaagcaaagacggttttggaaacttaagatcaagagccgtcaggcactgtggctcacacctgtggtcccagctactcaggaggctgaggcgggaggctcacttgaacccaggagttcaaggctgcagtgagccgtgatcacaccacggcactccagcctgggcgacagagtgagaccctatccaaaaataagagctctgcatgatatcctttgaaaatgcctccccatctcccgtgcccaccctgtcctccaaccgcgtggctacactctgagaaaccctggaggtctaagcgaggccctgtggggattggggaccccgcctccacctctagtggccgtgtctgcagttaggagctggcctctcaggcaccgtcagcagcagcccccccccccgggaaaggcacagtggtgctcttgctggtctcctttgtttaactgacccaaccatttacacagagcagtggttctcaagcttcttaggttgtgaaacatcaggaagccctgggtgttgttacagaacaccttacatgtgaagatacataattctgggtttgcaccgtatctggattcaggctatagcaggaactaaataacacctgaaggaaattttataaaagtaaagtcaatggcggagaaaattccacccattagcctctcctgcaagttggagaagactgtttcagcgacgggaaaccttggcccgaagtttgggagctccatcgttgcctgaacatttggagaatgtggggagtgcctggtgacctcatctccccattttactgatgaggaaaccgaggctcagaaagcaacagccacttaccaagtcccacagtggcaggtgcagggcaggatccaggtgtcttgacttttcccctacaagtcatgcaggtgccccctccaggctcactgggagaccggagctgggcagaagggagagtaagggaccagggaagcctggttggctgggaggaggggtagagggattctggatggtcaggctcagggtgggcaccagagctggagaaggtaagggtctactgcccagggaggaggcacagaacgaggtgtggggagaacccccactggctcagggctggctctggaggcacaggtggcccatgagactctgctggggtggggctggtgggaccaagtggccatcccacctttgtgtggatgtggccgctgcccctgtccctgggagtatgtgagtggcagctcgatgtgtagggggagctcagggcaagctggcttcaccctcagttctgccacttgctggctccgggaccttggcaggtttctcagccacctgagctgagcctgtcacgtcatttacaaaaggggccaaatccctgcctgataggtgtgtgaggagtaaaaacagtccacgtacagagtctgtgcccaagaagtggaagctgttctcatcttctgagccctgcactaagtctgctgtggggagtgttttcaggaaggtctcagctccctaaaatgctgctgtgcctcccgcagccactgcaccctcccgaagggcatcggtgagttgggagggatgcttgttgcccccaggctctggctgcctgaagaaccggggtagacacctgagcaagaggccagcggtgaaatggtatttggagctcgtgatggggtcttgtttgctgctgtcaacatatgaatatacctgctaaagtttttgcttaaaaagtcctcatttctacctgggcaagtgtagaaagggagcatcacggtttttattttattttattattttttttgagtcttgctctgtcgccaggctagagtgcagtggtgcaatcggctcactgcaacctccgcctcctggggtcatgcaattctcctgcctcagcctctggagtagctgagattacaggtgcccatcaccacgcccagctaatttttgtatttttaagtagagatggggattcatcatgttggccaggctggtcccgaactattgacctcaagtgatccacctgccttggcctcccaaagtgctgggattacaggtgtgagccactgtgcctggcccatgatttttttttttttttttcagagtctcaccctgtcacccaggctggagtgcagtggcgcaatctcgggtcgctgcaactctgtctcccgggttcaagcgattctcctgcctcagcctctggagtagctgggattacaggcacctgccaccatgcccagctaattttttgtatctttagtagagacggggtttcaccatnnnnnnnnnnnnnnnnnnnnnnnnnnnnnnnnnnnnnnnnnnnnnnnnnnnnnnnnnnnnnnnnnnnnnnnnnnnnnnnnnnnnnnnnnnnnnnnnnnnnnnnnnnnnnnnnnnnnnnnnnnnnnnnnnnnnnnnnnnnnnnnnnnnnnnnnnnnnnnnnnnnnnnnnnnnnnnnnnnnnnnnnnnnnnnnnnnnnnnnnnnnnnnnnnnnnnnnnnnnnnnnnnnnnnnnnnnnnnnnnnnnnnnnnnnnnnnnnnnnnnnnnnnnnnnnnnnnnnnnnnnnnatggcttgagcccaggaggcggaggttccagtgagctgagatcgtgccgctgcactccagcctgggtgacagagtaagactctgtctcaaaaaaaaaaaaaaaaaagaaaaaaaaaagagaagccacaaatagtaccaggaatgagcaggaaggcacaactgtatagacaggagtttatttttttttaatcaagaaaatacctaaaacagtttttttgccaatgaatttgaagacttagataaagcatactgtttactagaaaaaatataagtgatccaaattgactcaaatgaaagagaacagacctaagatattgaatcagtgagagcagatcaaagaaatgagtcagtggtaaaaagatttacccctaaattatcctgaacctagacagggttattggcaagttttatcaaaccttcagggaacaggtaatcatcatcttatataaatagagaatagaaaaaggaagtctcattttgtgagacttgcataaccttgatattcaaacctggaaaggatgatatggaaaataaaaactacaggctggcctgactgattaataattgaagatagaaaatgtgcaaaatcaacagttggcaggctgaatgtataaaacggaaaggcatcttcacatatcatcaggtgtattcaggaatgcaaggatggtctgcctagagaaaatctgtcagtagaattcaccaagataaaaaggaggaaaattacatgagcatcccaaaagataattgataaaattcaaccccaattaatgaagaaagtctcttggcacagaagcaacagtggagcctttctttttttttttttttttaattttactttaagttctgggatacatgtgcagaacacgtaggtttgttacataggtatacatgtgccatggtggtttgctgcacccatcaacccgtccactaggttttaagccccacatgcattaggtatttgtcctaatgctttccctcctcttccccctatccccctgacaggcccctgtgtgtgatgttcccctccctgtgtccatgtgttctcattgttcaactcccaacagtggggcctttcttaaccaaataaatggcgtctgccccaacagtacaggaacatgcctgaaggctactgggaaggaaagggacagctttcatggtgtgatattaatgtgttcccttaaaatcaggaaaaagatatttgattgaacaggaatgtttggaagatccaccccagctccctgggagctggaaactggatgtaggggggcggaggggggggcagtgttttttgtcttttgtctcctgcatagttttaattttttcaacaaacaaaccactcagaaaagaaaaaataccgtgtggcacgatggccttgaagttaggagacccacatgtccacatgtgagtcttccctctaccgcatgggaatgagcaggcgtttctgagaggtcagcacgaggggtcagaggttaggtgtttaggctgagccacccagatgccagcaaatgatgtagctgcctgaaracatgctgttcagctcatttctttaatagtgacaaaggcatgagttccgcctgcgtccccattgcaagmcttgacccttgagccttggtgccctgtctgactcttaattatttaaaagagataccttaaagagataatcgctttagggtgatggatactttggtgttctttcaaactcactgtgtaggtacattccagttttaccctgggaggcagggctggttctgcttttgaactatagaaatgagagatggaatcaaaggtacgaaccaagatcaacaatctcatcattcattcctttttcattactattcactattaccagcacaagtgattgtaaattaggctctgaggagagctctacctctcctttcaatagtgttagaggccgagagtggtggctcatacctataatcccagcacttggggaggcggaggtgggaggatcgttggaggttaggagttcaggagcagcctgggcaacaaaacgagtctttgtttctatgaaaaaattaaaaagttagccagatgtgatgcatgcctgtagtcccagctactgaggaggctgaggttggaggatcacttgagcccaggaggttgaggctgcagagagctgtgatcacgccatggggtcccagcctggagccccagcccattctgggtgcagcttctttgcctgggagacaaagctggacagagaggaagggcagggcggggacagcctgggcgctaagtaggagactatggtattgccagctcatctgccccctgccctttccaaatgggctgaaagcaaggtccctcctccccccaggagcctgtccgtggacagaagtctttagagcaggttacctgtattcctaagcccagggctgactttgaactccaaaccctagccggccgccgggggagataattgctttaggtgttctttcaaactcaccgtgtaggtacattccagttttaccctgggaggcagggctggttctgcttttgaactgtagaaatgagaaatggaatcaaagttacgaaccaagaatatttaaattcaggatagtagcacgatgaagtctttcggaggattcagctctctccgcctctgtttctggccgggtctgaagtgtctgcagtttcagaaccagcaggaaacccggaatttcactttgttccgcatttccccctgctcctttgatgccttcttcatctagacctgcaatggaagcaaaagagttagaatttgaaatggcaagtgaaacttaagtcatctgagcatctgcctgcatctctgtcccaccggctgcccagctgcttagtggacatgcctaggctctggtacgggatctaaagttctgtttccaaacagcgggcttcccactgacctggaggttctgtagcctccaaaagctggatgtgggtgctcattgcctgcgctctctgcagcccagtgccgccacaggaagagtaaaagcattcagggagcactgagaattttctgctgttccaattctgaccccttctctctctttctcttcttagttgcttcaacattttgagatcaaaacatcttctcagaccaatgctgttcatgcaaaaacccacgggctcctgaygccaggggggcccatccacgtgcgatttgttaacagaaagtaagcctagattttaaacctgggctgatgtagcagaccagctcgccgacacacagtgggtatttgtgttcgctgatcaccgtggagaaggaaagcgatgtcgctaaaggctgtcttgttatagactggcctcccaggtcctgggacacttgtaaatctttatgcaaagtaatgtaaaaaggttgctattttactggtgcataccagaagttgccctttctttgggggaaacag

SEQ ID NO: 96133 - DNA, 14055 bp, Homo sapiens
ccccgagggaggcagccaccccgccccagcccaggggacactgaggttttctgaaagggttcctcccagaagcctgaggccccagggtcccagggggtgggacagtgaggccaggctggagtggcagggccagcgcgtgcaccctgccttgcctcagctgtgccagctgcccacccgggtgactgtagcgtgaggtctgaggggctgcgcccagtagctggccccttccctgcctggggttcaggctgggcccctcccttccaggtgtggcagccaccaagctgcagaacaagagattctacccgatggtgtgctccacggcggcccggagcagcatgaaggtcacccgctcctgtgccagcgccacttccctccagtacctgtgctgccaccgcctgcgccagctgcggccagactcgggagacacgctggagggtctgccgctgccgccgggcctcaagcaggtgctacacaacaagctgggctgggtcctgagcatgagttgcagccgccgcaaggctccagtgtccgatccccaggcagcgacctccgcccaccccagcagtcgcgagcctcggccctgccagaggaagcgctgccgccggacctgactgacttcccagtggaactgccttcttgggctgggacagcccctttcctctgtcccttctttctctgtcccttccttccagccacactccagggcggagttggatgaggcccgtccggagggagccatctcttgctcccgaggctgggacagtcctttctgtgggggctctagggcccctctgctgctgtgctgggtggggaagcggctgccctgagccccaggtcttgtgggaggctgcgaggacgagagcctggctggagcccgcgttgctgttcccacagggcctcggtttttcctaacttgctctgcatgctgtcagcggctgccccgccgtcatagacttaaaggactgcaataaatgtagagttgatgtctaacacccacatggcgtgagctgaaacgtatccgtgcagaggccgggcttgcgagcagcctgggccttctcccaggcctcactgcccctccacatccttgggagtcccctactgcttctggctgagggtgccacaccccaagcctccaggtggcagtggggccctggagctgccttctggtccctgccgagtgtgtgtgtgtgttgggggggcacagccctgctgctgagctcccctggggcctacgtgttcaggactcagcacaggaaccgccagccatctgccagccagaagcccctcttctcccagctacctaaaacttcccctgcaaccacccaccctccccctgaggtcagacctgctcagccagagaacccacccaggctgagggtccacatgtggctgggggtcctccccaaccgcccagggtgtctggtctgtccccaaggctgcatgctgtcctggtggtcccacgtgtggtcaggagcccaggtccagcaggagatcagggttggctgtggtcaggaagaggcagatgcggcgggagaggtcaggccccaccctgcggggacgcccgccttcactgggcggcacaggaaggtcggccaggaggcccatgcgctcccgctccgtgctgcaggcctccagcgcctaggagcaggcaaaggcatgagagggcgcctggggacggggcttctgcacctggagggcttggaggaggcaggggcccacctgctgcagaaggcggggggaggggaaggctgtgacaactgcatcagccacggctgggctgacccgactgaactgcctgatctgcctccgccaggccgcctgcagccctgcgccgtctcttgccactggctcgccggctgcccagcgccctgctgtgcagaaggagaaggcctgggattcccggtactgcctggggacagagagaagccttttagaaccgcatgtgagcagctcccaaaaggccggggaggcaccactaccttgaggtgatcctgccccccttcagccttggcatcacgcacttgaggggatactgggcgagagccttggtaacggcgcacacgtgccgactcagctcctgccaagaggccaccagtagcacgtccaggtttgcccagagctgcaggagtaccagggcctggggaggaggcaagctgatgggcacgagccagaggaaggctacccgggacacacagctgatagctgccccatgtaccacgctgggaaccaaacccagccagcagcccaatcactgggacccaggccacctgactcacccagctcagacaggccctcacctcttccacctccggccagctgacggccacctcggcaccggccaccttcgggctctctggctgctgtgtcccccgggaaacgtgctggcgagacctgagcagaggtgaccattcctccccgctccccatggggcctgccctgcccgagcttggcctctgccagagcccacctggagaagtgggatcagctgtgccacagcaaccccagaagtgtgcccacctcccctgaacccccgtcccagccagccctgctgtgggcatgagagtgagcggtaccacaggtaggcatccagcccgatgacagccaggtggggccgggcggtggtctcgggggagatccagggcacccagtgggttgggccagagatctgaagatgagaacgtgtggcacagttgttcacaggaggctgcggcctatggccatgggccaccaggccacagctggtttgcagaacagcaagcctgaaaaagagccagtggtgccgagaggagcctctgttccgttaccccttctgagaaaaccagctctgtgcctcccacgaggccaaagaggctaaggagaccctggagtggctgctcgggcacatgtcagttccattgagcccctcatcctggtccacctctgtactccagcctagctttgacctagcacaaagcagcagcttgagagacactgatcctgggacacagggacctggcagggggtctagcctaaccccacgctacctggcaccacagcacctgagcactgctccccgcaggcaggggccaggctgtctgctgtcagaggacgaagcctgcagcctactgcccggaccccggcctcctgacacttctcaggatcctctaggagcagctgtagcctccgcaggtgcccaggagctttctccatctcaccctagaaacctctacggctttggatcagagaggagtcctggcctgccccatgccccctccagccccgtctacaggggcagggaccggcggagcaggcgcctcccggctgggaacccacccctcctgattagagagggactactgccaccacccgagcacctgggtcagtgtggcgacgccctgcagaaactcctcgggctccagcagcagcagcaattcctgttcacctgcagcccacacttcaggaggcagctgtggggacatggggacgcgctgctgcctgtctcaaccccgggtgccccaggggccctgcctgggcagtccagcagcaaagcggttcgtggccccagccaagcccaggccctgacaggcctgctctacagaagcccagtgttccctttcctgccaaggccaagctcaggccaggtctctgtggccggcaggaatccagaccacagcctgaatcgagacggaaccttctccagccagctcggctctataccagcagaacggcttgggcacctccacttcccgttctccatccttgctttacccatccgcgagacgcgcacggcccagggcagctgcctcagggacagctccagggctgaaatcatggaagcaaaacagccaactcgcggctggccctcgggaacccgcgaccactcacgctgcgggggcaggggtcgggactcgctcgggtccaccgcaggctgcgggccgggcgctggggctcgatgcggcactcgcagcccagggcctccagggcctccatcaggacgtcggcaccggcgtcttccaggatggctgggaccgggggagaggagcgcggtcactgcttccttccaccctcgcgagcgccctacctgggcgggtggccggaccggggagtctccattcggcacaaacccccgactgggaggcgggcccggccccaggcccctcggcacgcgcgccccgcccagtcggacagagggcgccgcctggcggagaaaggcctttcctaccccgagtatcgcccgtgccctccgccgcacctgtgtccacgcacaccgcgaggcgcttcagcacctgctccggccgcagcagccgcaacgcctcggcagccgccctgcgctcacccgctgggtcccgggctctcgcggcggcctccgagccggcggagtcctcagcgtcggagtctgagatctcccaggttggaggtcgccgctgaccgctcccgccccgtccccggccccggccctggcaagagacccccgccctcccgggtccaacccgcgccatggccggaccgacctcttcctcgcttccggccgcgaccgaacactttagcctgggacaccggcctcttccggtgacttccggccggaccgctgaggacgcggacccgccatggcgcggaagaaggtgcgtccgcggctgatcgcggagctggcccgccgcgtgcgcgccctgcgggagcaactgaacaggccgcgcgactcccagctctacgcggtggactacgagaccttgacgcggccgttctctggacgccggctgccggtccgggcctgggccgacgtgcgccgcgagagccgcctcttgcagctgctcggccgcctcccgctcttcggcctgggccgcctggtcacgcgcaagtcctggctgtggcagcacgacgagccgtgctactggcgcctcacgcgggtgcggcccgactacacggcgcaggtaggtgcgtgcaccccgtccgcaccccgcccctgcagccgcctggtctccccgcctcccctcctccctgcaggtttgcgtggctgaggctcccacctcctgacctcgggggccgagagctttgcgagctgaccccgcttccttctggctttgcagaacttggaccacgggaaggcctggggcatcctgaccttcaaaggtaaggctcgggagagcgggtgcccggcagttcgatgccgaccgccgacggcacagcaagtgtgtgcagacgcctctttttcttcatcagggaagactgagagcgaggcgcgggagatcgaacacgtcatgtaccatgactggcggctggtgcccaagcacgaggaggaggccttcaccgcgttcacgccggcgccggaagacagcctggcctccgtgccgtacccgcctctcctccgggccatgattatcgcagaacgacagaaaaatggagacacaagcaccgaggagcccatgctgaatgtgcagaggatacgcatggaaccctgggattaccctgcaaaacaggaagacaaaggaagggccaagggcacccccgtctagaatgccagaaccagcgggtggccttaggggctgtgaggcagtggggaccttattgatgaaagaaaccgtctttgcgttacacccgagtctgcctctcggagcagggagctcaccttccgcgacgtgttctgagggtctgcatcttaggggggagggctggggcaaatcgccacctgtgcctttcctctggccctgctgcccccacacccaactccgagggcccacgctggggaaagcgggaagcgctcgctccctttcccccattagtgctctctctgcctggatcccggcagaagctatgaaagggaataaagagaaaagaagtacccagggtcgtggtgtctttgcgctctgtctttaggaccggggagagaagggctgacgctgtggtcgtggccctggccgggggggcgcggggggggcggggttcgggcggtgcggagcagggcgccgcgtgggtggaaccacctgggcgggttgtgggggatacagttagtgtccgagctgctggaggagacttggcctccgcagctgccctccggccccccacggctgccgggttccggggtgcaagtgaagcagcctccccgcggaggccgcagcgccccgaccaggcctctttaagcgcaggccccgccccgggcgccaccgccccgccccgcggatcccgctcccgcaccgccatcatgatctgcctggtgctgaccatcttcgctaacctcttccccgcgggtgagccgcgcggcgcgggccgggggcgggtggccggtgctgggccggcctgacggcccgtccccgcctgccccgcagcctgcaccggcgcacacgaacgcaccttcctggccgtgaagccggacggcgtgcagcggcggctggtgggcgagattgtgcggcgcttcgagaggaagggcttcaagttggtggcgctgaagctggtgcaggtgggggcgcggtgagcgagcgggggcgcggtgtggggggaaggggagcggggacctggggacgcctaggtgccgggtgcgggcgcaggcggcctgacccttccgcaggcctccgaggagctgctgcgtgagcactacgccgagctgcgtgaacgcccgttctacggccgccttgtcaagtatatggcctccgggccggtggtggccatggtgagtatccgggaagcgggcgggcggctccgggacccccacccccgcgtgataccgcgcccgttcctccgcacaggtwtggcaggggctggacgtggtgcgcacctcgcgggcgctcatcggagccacgaacccggccgacgccccgcccggcaccatccgcggggatttctgcatcgaggttggcaagtaaggcccgccccggggacggtcccagccccgtccggcctccccctgttcagcctgcgtggtacccgtgccggaggtctctttcccacgctcacacgcgcctcttccgcgcaggaacctgattcacggcagcgactcggtggagagtgcccgccgcgagatcgctctctggttccgcgcagacgagctcctctgctgggaggacagcgctgggcactggctgtatgagtagcccggcagatgcgcgtcacagaggctctcacactccagcctcctccagggcccaggtgggcgggcttctggccccaccccacagcgcttggagcatccctttggacgggctgctgaacatccacctgtctggacgttgcatggagggtggcgcaggcctctccaatccctggcgtacagggtttcctgcccgaggagctgctccaggagcctgcgcggctcgcctggaaacgtgccaggacactgtcctggtgcccagcccaacgtggtccaacgtttttttataataaagtcctcgttttcgtttcgrtttgggcccaggaacaggcagctacgacgttaagacatttattacatacagagcagatatgtgggtttgcttgcagggccaaagcctgaggagaatcgtcacccctcccccagccgccccactgctcagcccggagtcacttcgagatcctgggggaacagacgagggagcggacatacatcacagtggaggtggcagggtggtggggagaagccggcagcgcagcggctgcagccctcggtggccagcggggcttgtggggcagctccccaagatctgtgcttctctggttgggggtgggtgcgggggctgggctgccctcataagggcctcccagacaggagtgcagtgggcctggaaggtaggaataggccagagaggcccagctgggcagggagagcagtccagggtggcgtctgccctctgcgggcttggagtcggctgggggcggctccatcctcagccccacgggcctctgcttggtggcctctctgttgctccctgggagcaggccacagcgggcaaccctaggcacttagtagcgtgtctgggagctgggctccgtggagccccgtgcaggaggcaggccccgggagcacatcatcccccatcaacctgaggctgagcctgtgtcctaggactgatcccggagaggccaggggcctccccttcttcctgaggcctgggcctgccctggcagcctgagaaatcccaccctgggggcttctgggagggacaggactccagggcccactcctccaaggtgagtcttctgcccaggcagagcctggggggacacgggtcagaacggggctggcaagagcctgcctgcatgggcaggatggggtagcagtctctgttctcaagcagctgccccagggagccgggcctcgtgcttttatgccagttccctgggcaggggacagctggggtggggacagacaggatagaggcttgacgacggggaggccccagagaaggccggctggggtgcaggcacctgggcagcctgaggcccacctccctgggcaaaggctagtgcctggcccagctcccctaggcagagtgagggcccaggaggcagggtggccccatgagcagcatgcagaggtgggcccagggcaggcagcctcggcggcggggagcccctgcctcctccaggggtgctggggagtaggaggcccagggtagagccaggaccacctcggattctgcctgcgctgggcccaaggtgccctggacttgaggactctgggctggaagctggccaggagctgcccgggaaactgtcccgagagcatcttcccctcgggtggaagcacccctcccctcctcctcccagctgatccgcatccccgcactccctgcccgctggaggggccagactcaggtgaaagctgcaggttgagaggttagaagaggggcggcggcgcctggctggctaccccgcgggccgggcgggggtcaggtggtcgggggtcctatgtacaggtcgggccaggcagggcagcagcttcactcgggggtgtaggacacctgccacacgatgatgtgactgcgctctgccttggacagcacgggcttcacctggctcatgtcccctgcgccctcctccgtctcgtcgtcctctccgtctcctgcgggcaaagcagcagagtgagggccaggctccccccgcgcccaacctcagccctgtccctgggccccgctcaccaatgcggaagtcgatgtagccctccccgccgctcagcaccagcacgttccgcagcttctggccctcgacctccgaggcaggggcagctggcccagggccctcggctgggctgtccagcacactgccattcagggtggccagcacgttccctgggatggcagaagcgattcaggacagcggcctcctgggggaggcggcggccactggcatgcaggggatgtggatggcaggaggggcccagcctcacctggcaccgagacaaagaacttcacggcatcgcggtgcccatggaagcatagctgggcctgggccatggagcagtaggggatgaagctgctggccgccctgtcactgctgtcatcgccatacacgtggatgatgcccccgggacgggcgccctccccagaggtgggggatgtcttattggctgcagggagagaacccagaggcgctgagcccgcatacaggtggaggatgggagaggctcccgtgaggggacacgaggtggctgggcttacctcggagccccaggagctggcctcggtgcaggaccacagctggggacatgggaggagcatgggagaagaggagagcggtcagcgtaggggcagcaaggcaccctccaaggtggccctgcagagccaccccgtgaacccacgtacacctctggcagcaccactgcccctgcaggggtgcaggccactcactctctgtcagggggatggagatgaccactccgttgccggtgcccacccagagccggctgcccgcgacaagcagggccgtgatgcgtacgaaggagaaacccagcttgccagtgcctgtgggggagagcggtcagggtggctggccttgagccccccaccaccccacctggcgtggcccctcacctagcatcttgctgacgtagggctcaatgtccacgtcctgtagatgctggtgcgtgtgtgcatggtagagcctcagggtggagtccaggcggatggacacccatacgccatcgccgatccacgccagctgccgcacctggctctcccgccgcgggtgggcgtcaaatgacttctgtggagtcatggctgcccatcaacagggctggggagaggagaggaagtggggagccccaaacctgccacagctccagggccacctgcagtcccctcagacctcccagccagcgcctgctttgcgcctgttcaagcctgagtcataggtggtacaggggagatgggccccacgtagggcctcgtggacttccgtatggaagatgcgggagagctgctggccagcaggagcctcttcccctccccggggccctggccggcactcgcctctatctgcatggtcttgggctggatgacgtgcaccttgttcttgtagccacaccacacgcggtcgtacacaacagccatgcagcggatggagtggtgcgggtggcccaggtccattaggtgatagttgctcagatcccactggccatctggagggagccccggacacctgctcaggcctggccaggccccacctctgctcagggcatcgggttgagacacccactgccagactaaggagaggcctggaaccccgggagccccttggctaaacaatgccagggccatcagctgccacccacacaccccgtgctgccaggccccaccttcaccacggtggaagatggccagggtcccgtccgccagagccaccagcacacggcctttgacatgcctgaaacaggaatgcggtgagcctggtttgggccaggctgtgccagccccctccgccccgttcccccgcgccgcccggccctcggtctggggtcacccacaccaggctcagcacagaatccttcagcttgatggagtgcaggcacttcttccagttggccacagccgagtgcacatagagcctagggaaggaagcggcgatgggcgaggggctcacccaggaccctccctccaccttgccccgggcccttcctaccagccgttctgggctcccagccacatggtgggtgcagcactgctgcctgctcccgtggggtccccgctgggctctggctctggccgtgtgctgctgctgtcaggctctggcccgttctcgctgcaggaagaacggtggctccagggggggccacggagcacgcacctgccccaagaccccgaggcccttcccacctctgcaagccttccctctgctcctgccccagcccaagagctcacctgccaggctgggggccagaggacggggtcggggctgggtcagtgaagacgtgctctgtgagaggcccgggccgcaatgtggctgtctctggctcgctgggcccagggtctggcacctccgtggcctctgtggcctcctctgtggactgggacgggttgaccttcccgttggcgatggtggccacctcccctgtgttaggagaggtgagcttgggctgggcagaaacgtgggaatgaggggatgggggaaactcgcccaggactcaccctgccccttgtctagcactggggtgtcccctcgggaggagcagttgctccgcggcacgttgcagcgggtggcacagcccaccagggtgataccggccagcacgccatctgcgcccgggtcctctgggttcacgtcgctgtccaggaacatctccccgggagggtagtcgctgtcgctggccgctggggagagggacagcccgtcagcctgtgcgggggaacccactactgcaagggcgtgcccagcacttacacaggggcagaggaagccggggctggccttccactttcccagcagacccagcttccacacatgctccacccacagcccacccacgaccctctgcctggaggtctgggactccagcaagcctgctctgttgggtaggcccctgggccaaggggagctgagtagtaagactctggttctgggagcaaacaacctgtgatcctgtggcagaccctcaggaccccagacggccctgtggtttcacaccagagacctggcagagccctcggcaccccttcgtcctcccagtgttggggctggcccagaacatcaccaaggctactgcccacaggggtgacacgaagctcctcacccacacccccatagccccttcggcccaactggaggtttcacattcagcatgaggaaatgttttcctgtggtctccgagtgatgcttcaagctgcaggccgtgcccacccgtcaccctctaaccaggtaagcgtggggtcctgagtaggtagggagaagaggccgaggctgccgcgagcttcctcccagaaacagggcccagggcctcacttgactgggtgctgcccctcccaccgtccactgccacattcccgtgtccacaggacaccccgagaaggcagctgctgtgtggcagggcttttacttagcttgctagtaaaagggagtggcgcccgagtggaaacgcccactccagctgctcaccggggatgctggagatgcacagcacgtgcgcgttgcagacggtgaactggtccaccaccgtgcccggctggttggcgtcgatgatcaccaccttgctggtggtcagggtgctggtcaggatccacacccggctggaggtggcgtccatttcagggagctccttggcctgtttcagggcacgggatcaaggtcagagcccgagcttgaggctacccggtggcagcacagggccatggggctcccagaatctgtcaggatccagccttgactacagcttgaggggacatggctgtcctcccccaggaccagaacaatgcggactcaggactgcactctaaagcactcacagacacggtttcgcctccacagaagaggcccctgagctccaagaggcccaagctgggcataaaactaagcctcccaccactgggaggcaagctctgccgctcctgggctcctctgtgcctgctgcctgcctgacccctgcagcccagtgcaggcccactccaggccacctggggggtgaaaactgaaaacccagaaggcggctcagtcctggtgagggaagacactgcttcccgcagtctaggagcccctgcgctgccctgcttccgggtgctgtccccagctgtcctgtgtctcactcccagcatgctctgcagctgagctgtcctgagactaagccagggagggtgcccggtggcctcggccatgctcaccttcttcttctcgggagacgtgtgggcgctcttgggctcgccgtctccttcgcggtcgcaggtcaggggatcgcggcctggcgctggcttgactccattcccagcgtcgtcctcattgggcctccacccgctcaggttgacgcccgcggcacaccacagctgcaagggcagggccgaggtcgggtgtcaccggcactccccagcctcccgctcgcccagccagcctgagcggggtcctcgcgggctcaccttcatggtggggtccttctccaccagagggcggcagtacaccggcaccggcacgttcttcatccgcgtgtcctcctggcccccgttgggactcagctgcagggagcagggaggcgccgtgggcacgaaccctggctcctacccatccctccagaaatctgagacaggtagggctgccagcttctggcggcacagccacttcaagactggaggcaggtgggggcgtgggagccgcggggctccttctccgaccctccagacccctgcccaggaggctcactaggaacctgccaggccccgccccacccgccgtcctctcccaccccctagcactgccccgccctctccccgccccacagcgccccgccccttacccccgccccgcctctgcggggccccgcccggtccccgcagcgcccgcccgcacctgcttgtacttggcgggcaggctccagccgcaggcctgcagacggccgtcgtcgttacgcacgtgctcacgcacctggcggtactgctcgcgcttctgctctcgacgggcggaggacgtgcagtcgct

SEQ ID NO: 96134 - DNA, 31686 bp, Homo sapiens
gacatgaggacgacagctgccactttatctgtttgctttgcagcagccacaaagtaaacggctcaactgcacaccattgagagtcacttgcttcagggcgcagactccagctgtgaagacccaccgctaaggtcagtgttgacccacggcctgggaggtttgacctggtactttagaaggctacatgccctccaccacaggattgaaaaaaaaggaaaaagtgagtatatgaaactgtttcctaaggctggtgttgggagataaaccatcgtcagtcatgttttatctggcttttaccatgtgcagccacagaggagggatgcaggttcacccctaagtgtccaaattgtggtgataaggtaatgaacgacttgacctagttgtgcagaacaggccttccatcctcccttggggagaactggggggtttgtgaagccaggtgaatggggagggtggacagggaaggaaggagaggagagaagtgagggtgtcgtggttggtgctggcttggctcccactgttggttcagcaagagtgggtatggtgccccctccactgagccccgtgtccaggagctcaggagaagccaccttactcggttaattttaaaacattttgtagagacagtgatcttggcattttgcccaggctggtcttgaattcctgggctcaagtgatccacccacctcggcctcccaaagtgctgggattacaggcgtgagccaccgtgcccagctgacacttatatttttaagaaaaagaggaaaataggccaggcgcggtggctcacgcctgtaatcccagcactttgggaggctgaggtgggtggatcacgaggtccggagatgtagaccatcctggctaacacggtgaagccctgtctctactaaaaatacaaaaaaattagccgggtgtggtggagggcgcctgtagtcccagctactcgggaggctgaggcaggagaatggcgtgaacccgggaggcggagcttgcagtgagccgagatcatgccactgcactccagcgtgggcaacagagcaagactttgtctcaaaaaaaaaaaaaaaaaaaaaagaatgaccatagccatgatgcccagccttagctggggtgtcggtgtaaaggtattcttaaacagtcttgtcaagtgcaacatggtagttttttttcctctgcaatttggcaaaaagtgtcaaaatttcaaagtgcaaaccatttcattgatttcacttctaagacttccctaaggaaacaaacaagtgccaatgatgtagagcagcggcccaaactttttggcacctgggaatggtttggtggaagacagtttttccacggattgccgggtcggggggcggggatggtttcaggatgaaacagttccacctcagatccaggcattagatactcataaggagtgcgcaacctagatccctcgcatgtgcagtttacaaaagggttcacgctcctgtgagaatctcatgccaccactgatctgacgggaagcagaactcgggcgggaatgctcacttgcctcctactgtgtggctccgtttgtaacaggccacgggctggtagcagtcagtggcctggaggttgggggacccttgctgtagagtatatggaggatgccccttgcatcattgtttctaatagcagagcatctgaaaagtgtgcaatctgtcggggatgctccacccagaaaatcttcacttgctgaagtccctcagcttctatgagggtcagaaaattacctgaggaagctatggaaagggcggggagagcagattctggtgccaacagactcctcgctccagagcttccccttgggttcaccagctgactgaagctgatatccagcccagagaccactttcttccttggagtttgctccctgccctttctgcttcattacgcttctcttctcctgagagcactccttcagcaaatcacgggaacaagaatccccatcttaggctgtgcttctggggtacatgatctgagatacagccattaaaaaggggtacctgtacttatattcactgacctggaaatatgttcgtgatatattaagtggatgtgtaatactcatttttttataaaaggccaatcaacatgttttaaaaacacaacagaagaacagatgtcaaaccatatattctgtacagactaatacactgtggaattattttcttaagcgtgataatggtctcatttccatgtaggagaatatcctgattcttgggagatgtatgctgaaagggaagagtctttctgcagtcaccatcccgacgcatttccaaaatatgggggtgtgtgtgtgtgtgtgtgtgtgtgtgtgtgtatagagagagagaggtgcatgtctgcatatatacacatatatggcggggaggaagggagagacgtaggaccagaggacaaacatagtgaatgctggtaattgttgaaactattaaagggcatatggagttcattgtattggtttttaaactttttcataggtttaaatgtattcaaaacgtggaaaaacgttatcttctgaatgctaggattactatgattttagcaatatcaggaattgtcggacttggtgtctctgtttttgattcttgcatctaaggactttgtgtgcctacacctgcaatgctgatgtcaatgtttgtgacaaagcttgttctaccactgtggtgaacactgaccccaggggcactgtactcggtgctggcttgtgccacctactagggctgcatgtgagcactgcttctactttataactttgactttaatagtctgtcaacttggtagctatatctcagctgaaccgtgtacctggtagcagactaataatacacttccagcatgagcacgccctttgatccaactcttccacttatgggaacctagccaaaggaaaaaacagcacatgtgctgatactagcaaatcattagagacaatctcaaggtccaaaaatggaggcttgacttcagaatcttatgcaatccatgaaagttgtactgcagaaatgtgtcagctaacaaggaaaaagatggtcacaatatacagtgaaataagcaagttaaataattgtatggtatagctgggcgcggtggctcatgcctgtaatcccagcactttgggacgcccaggcgggtggatcacttgaggtcaggagttcgagaccagcttgaccaacatggtgaaaccctgtctctactaaaaatacaaaattagccgggtgtggtggcgtatgcctgtaatctgagctacttgggaggctgaggcaggagaatcacttgaacctgggaggcagaggttgcagtgagccgagattgtgccactgcactccagcctgggcaaaaagagttaaacgccatctcaaaaagaaaaaagaaagaaagaaaaaaaagaaaattgtatggtatgagcaaactctatttaaaaaattacaattatatccacagacttggaagaacttgcaataaatgcttaactttggctgtctctgggtagatgaaatttttggtgttttgttctaattgctaatctctattttctgactcttctgtaattacatgcattgccaagcaatgaaaaaataatactaaaagtagttaagatagcatgatacttaataaagaaatccaattatggcacttcctcatactatattataatttaagcatggggttgcagcatacctaagtgtctgattcttcttatgtatctacttacaagatgcagcctgcattgtggtcaaaacttcacgttctggtcttgggggagctgggttacatctcggctctgccactaagctgagtgactttagccagccttcgcagcctctagatctgtcttcatctgagtaatggggatggtagtgatcatactaagcttatggcttggttgctggttacataacacgtggaaatacagaataaactgcttggcatggtgcctaacagtactgtgttcaatacatggggaccgttactactcaatcagatgtcctaggctttcttcaggggccagcagatgatgtgaacgcgaacaggaacccctgccgaagcccaaaggactcctccaggcattgacagctatgctgtgcatcttgcctggatgttttttcagaggagggtgcaggcaagagcaaaagcagcagtctcaggctattcaacttccacaaagcctccttaactccggttgggaagtacagttgctgattaactgtgttaacacagcacagtgctcagaaggccaaaggtcaaagactaaggtctgaagccccacaaggaggaaatatccctcctcgtcattactggggggaaaaaaattacccttgtaagccacttagaagggagcacctttatttggaaaacagtaatttcaaaatcatctcccgaactcagaatcgatgggtctgggtagataccctaagtaaacaggtgaaatcttcattacttgttcacttattaagtaaaattttaaattaaccgattatgtacaggagtgtttttcacatttcctgataagaatcacttggaatgccctgtaaacacagcttcactggagattaatcctatcaaattgattcagcaagtccgagatgggccagtaatttgtggagatttttatttttacaaatgcttcctgatgatgaccaaatctaagaaaatttggtaaacaacggaaagttatctggaacataactttcagttttctctgcagtttttaagtgctgaactactgatcatcctagagataacccactgaaaagtcttctctaatccagttttacaaaaggaaagtctttttaacatttggtttgataaaatgttttccgaagaaatactttacttgcctgttttcatttctggcccacccgttctacttcacgttttcttgaagggttcatcttctatgagttgaggcatagcaatctaatcatttttaaaataaatggtttcttttttttttttttttttttgagacggagtctcgctgttgcccaggagtacagtggcgcaatctcagctcactgtaagctccgcctcccgggttcaattgattctcctgcctcagcctccagagtagctgggactacaggcgcccgccaccacgcccggctaattttttgtatttttagtagagacggggtttcaccctgttagccaagatggtctggatctcctgacgtcgtgagccgcccgcctcggcctcccaaagtgctgcgattacaggcgtgagccaccgcgtccggccaataaatggtttctaattaaaggattgtgacatttaatagccgttgcttgctcttgtcttgctcccttctctctcgaaacttgttaagaaataactcaatattctggcttttccactttaaatgtcatactgaccagcccgtgtatgccagcctcgatctcatcgttttctttaaccggtccaactccctttggcgtcccagtcaagataatatctccttcttccaaggttatgatcttagaaacatagctgatgatgtaggggatggaaaaaatcatggaggatgtctcaccctcctgtctgagttcgccgttgaccttgagccagagcttcagcttgtgagggtcagggatcttctccttgggcacgaacgcgctgaccgggcaggacgccgtgaagctcttcgccagagtccagggcagccccttcttcttgcactcgtcctgcacgtcccgggcggtcatatccaggcacagggcatagccgcccacgtagtccatggccgcagcctcggggactgcgcggcagcgcttgcccatcaccacgcccagctccagctcgtggtgcaggttgcgagtgtacgcgggcatgaggatgggcgagccctcgggcgcgtaggccgtggacggcttcaggaacagcacgggctcgctcaacaccgcgctgcgcatctccctgacgtggtccgcgtagttcctccccacgcagacgatgttctttccccactcccagaagcgggacaatggcctggatgctgccatgattcccatcaagtgcccctgtagtcacgtgggctgggccggtcagctgatgcmtacggcatcccggagaggaccaactgcctcggaacgctgtcccccgcagcgacggcccgttccacctcgcgatctgccgggtacccgggcggcgtggcgctcggcctccagggatccactgtgcggtgccaaaaaagaggcggaggctcgcggcacagctctcccggcgcagctctcgggccgccgccgccgctcccaggcccgtctcccggcccgtggcagtcggggctcgcggacaaaacaagttgagcgcgagcgcgttgattggttggcggacggtgcgaggtggacgctgattggctgagggcagcgcgaggcgggcgctgattggctgcgacgcgccgacgccggtgttttgcagtcctgggcagctcggcagtcmagcccggcccgggtcatggtggtgggccgagggctgctcggccgccgcagcctcgccgcgctgggagccgcctgcgcccgccgaggcctcggtgggtgcggcggggcggtgcgggccgggggacgcgggcctgtcggggcgggcagcgggcggcgccgggccgtcgtttggcgaccgctgacgcggtgtctgttgcgcaggtgcctaaggccgcgctgccgggctcgagcggaggcggcgcaggcgctgaggctggcgcggagcgggcgcggggccgcgggtgcggaaagcgctaggtaagcagggccaggcctgcgtccgccgcggcctccacgctcgggctgggccggccgcgcccctgacgcctccagggcatcgcgtcctgcccgggccggcgccgaggagagcctggggcgcggctctgaggcgcagcgggcagggccccgggacgcctggcccaccccgcacctgctgccccgctgcaaggaccgcggtctcgcggcgccgcctgcggtggtggagctgcccgcccggcgccggagcccccgtctggggacccggcgtgtcattcgcccgaggtggtcgcgcggccgggccaggccagcgccccgggcgggtgcgcagcgcagggcactgggcgggcggaggcgcagacagggaggcgtccctggcggtttccagatctcgccgaaagctgtcaaggctctgcagggggtagaatgtcgccattgctaaggaaaggacatggattttgaggtcctcagaattacagttttagggacattcataagggtccaggcagagagttccagcgggactgtgtgcatcggcagggcgtgcgtaccccattctaagggaggccccagcccccgtatttggtgccgcccagttcaagggaagcaagatgctgtgaaacttcctgatttaaaaaagaagtgcagtgacgcacgcctgtcatcccagcactttgggaggccgaggcgggaggatcgcttgagtccaggagttccagaccagcctggcaacatgttgagacctcatcgctacaaaaactaaacaaaatcagccgggcgtggtggcacacaactgtagtctcagtcactttggaggctgaggtgggaggatcgcttgagtccaggaggtcgaggctgcagtgacccttgatcgcaccactgcactgtagcctaggggacagagtgagaccatatctcaatttttttttgtttttggggccaaaccgaacatgtttctggacttggtccaggccccaggctgcaggtccttgacctgtttgtacaaagtattacagttacaaaacagcaagccgggaacatttgccaggcagtgctgggctgagtgatatggaaagggaatacggtttctgctggtgttggcaccagctgcgtctttcctcagaaataaaggcacctccctgggttgtcagcttcttcaggaggctgtgatggtctccaggggaggctgagcaccagttgtaaatgacattttcttcgcctgggcagtgcagtggccaatctcggctcactgcaacctctgcctcccgggctcaagcgagtctcctgcctcagcctcctgagtagctgggactacaggygctcgccaccacgcccagctaatttttgtattttttaktagagacaggtttcaccatattggtcaggctggtctcgaactcctgaccccgcgatccgcccgcctcggcctcscaaagtgctgggatgacaggcrtgagccaccgcaygtgggcagtatttttgtttgtaatgttctgctccttgtttgtaatggagctcctttccaggaggacgcccggcactcggaatcctgtcacaacccttctgcaccccacctgcagcccccagcacccacactctgcttgktgtgctccttgggctggggtggtgctgaggctaaggggaaggggaataacacaggaagctgctcatatagaaatcttggtattattgttcctgaggagaatgatctggaaaatgcccagctggttgtcaggcgggtaataggatatctttgtgcagtgattgaaactatagtttgggcagtttccccrgctgtggaaataaggtcggattccgcatttcggtgggccctggagacgcgtgtgtctgtcagttggtggctgctgcccatttctggatcccttttgggagaagcccctgccgtggcacctaccccaggactgcactgtcctctgccaccttctgtggtttcttccccgtgtagagcggaactgaaggtattgtcggggcccccaggtatttttagatttagtaggagtttcattgctgaaaatatttttgcattggtcgactgggtggcagacacttttgtcccttggtcacccactcctcccagctcttgggccttctgggcccctgtggcagagtcctttgggtcagttggatggtggttttgtgtcctccacacttgaatctgggggcagttgtggccaactttccgtctcaaaggaactgctgatttttgtgcatatctcagattcgtgctgttcaagagcaagtattgtttgtttgtttktttttttttttgagactgtctcactctgttgcccaggctggagtgcagtagggcgatcttggctcactgaaactttcacctcccgkattcaagcaattctcctscctcagcctgccgtcaagtattggttctttctggctagaggctgagaagggctgtaactgcatggaacgcaggctcgcttagtcagtggtggcagcacagcttgctggagggcagatggccaggcgggggcacccctagtctgtgttcccttcttcacattctgtccctgagtccggggtgtgaataatccagcactggcagtggttcgcctcacaatcacaagctggccttcctgtccttttagagttctcaaaaaagaaaatagagatcgtaagtctgaaacaattgatttccatgaatgtgagcatgagttagttcctgtgttctcctcagggatatatgaagatattcccttttttttttttttttttttttttttttaaggaacaggttattgtcttgtcacccaggctggagtgcagtggcacagtcatagctcactgcagcctcaaactcctgggctcaagtgatcctcctgcctcagcctccggagtagctgggaccacaggcatgcaccaccatgcctggctaatttttaaatttgcaaagacaaggtcttggctggtcgcggtggctcacacctgtcatcccagcactttgggaggccgaggtgggcggatcacaaggtcaggagatcgagaccatcctggctaacaccatgaaacccgtctctactaaaaaatacaaaaaattagccgggtatggtggcgggcgtctgtagtcccagctactcaggaggctgagacaggagaacggcgtgaacctgggaggyggagcttgcagtgagccgagatcgcgccactgcactccagcctgggcgacagagcgagactccgtctcaaaaaaaaaaaagaaaaaaaaaaagacaaggtcttgctatgttgcccaggctggtctcaaactcctgccctcaagcagtcctcccatctcagtctcttaaagcgctgggattcccggcaagaaccaccatacctggccagaatattccttttcaaaggaacctagaaaggctgggaagcactgcagcttgcgcgtcctgtcktggagggcctggcgcggctgcccgctgagttgtgctctgtgtctgcaggtccagccctgctgggagttttctgccacacagatttgcggaagaacctgaccgtggacgagggcaccatgaaggtagaggtgctgcctgccctgaccgacaactacatgtacctggtcattgatgatgagaccaaggaggctgccattgtggatccggtgcagccccagaaggtgcgcatggctgtgcctggctctccctgccctggtcacccagctcggagtcctcacccccgatgggtttcctaaccgcagtgtccttgcaactttgcctaagctaaatggaarttagtctccggccactctgttaacagggcyccaagaagggtggaggcgagaggcagtgacacagaaagcgctgtgcagtacaatcctgggcacttgagtcttcttgggggctttctgcccctgcatgctgcctctgggggtggtgccctcagagctggaggggcttggagcggtcgtaggtggttgcaagagtgtcaggctgagcaggaaggagaaggtgctttcactggctctcctggagcagggcaagctggcagggtcaggacgggccaygtcagcggcccctcatggcgtgtcctgggttctgctgggcaccctaccatataggccagcaagccaggcctaggagtgtgacaggcctttgtccttccccggggccactgcaggtcgtggacgcggcgagaaagcacggggtgaaactgaccacagtgctcaccacccaccaccactggtaagtgccgcgtctcacctgggggtgtgggacctggctcacttctcgccccggtgggtttagggacatcaaggcctgtctccccccacggctctgtctgctttgtgaggacargcccccagcagacttctgagaaagacycgggactcaccgtagcccccaaggggcaagtctggtgctcagtgactctgargccccgagggtgaggggagaaggttacagccttaccytcaggccccaccccccggctctctcctgggccatgcgggyttgtgccctggcaygttggcctcaatgttggggaggaaatgagtctacaggtgagtggtttttawaaaaaaamaacamacmaaammaaaaaaaaacaagcagccagccgggcacggtggctcatgcctataatcccagcactttgggaggctgaggtagttgggtcacttgaggtcaggaccagcctggccaacacggtgaaacccagtctctaccgaaaatacaaaaattaactgggcgtggtggtgggcgcctgtaatctcagctactcgggaggctgaagcaggagaatcacttgaacccrggaggcggaggttgccgtgagccaagatcgtggcattgcactccagcctgggtgacagagcgagactccgtctcaaaaaaaacaaagacaagcagccatatctggagaggttgggtttttaaaaatccttgaaaatggatgaataaaatgccctgtctgggttctagggctggcattgcctgctcaaggccrttgtttggcttttagaaatttttgaggctcttcaaagctagagagacttacttctttttgccaagcaagcgcccgagggcaaccggcacctttctcctgagccaggacccgtctggcactgccctagggcctctcagctgtggcttccccagcctctgtgttggggtgaaatgaagcctttggtcctctccttggtggtgggagcrctgtgctggtggcttggccaaggtttgatggaagcgtcatggttcacacgcagctggacttaggcctggagagtctcaggctctgtgagttgggccccwcgagcctcttcggggtcatcagaggtgtccgtgcagggacctgggcttgaggggcggtgcctgcagcctccctggcccttgtcctgtgtggctgagctgctgtctctcagcacgttggcctgcctgtcgtgcgaggcccytgctgccaccatgcctcctcctggggaccctggtggtggcctctgtgtggctgcctggcacatcacagcttgctgcagctccctgcctctcccggcctcgccgcagacgtctctttctaacactgtggtgctttttagttccccggcccctctaacattcatgccgacacgtgaagtcctaagccaggccatagcttcagcggggtggggtttgctcaccgatggtgggtggtgatgggcagaccaaggcctgtggtgccgcgccctcctgaagggtgggaggggcagagggcagcggccaccactccaccctgttatcttgggrcccagtggtgccaaggcaggcggtttctggtgtggttgctggagtcttcatgggaggcacacgaaggagtctgtgatatcatgtgagacccgggaagggccccttcaaccgcccctttctgaamtgcgggtcaggcaggctcccctggggaaacctgggcgcgtaggaggcacctccacctgctggagctggcccaggctggcctcccctgcagacagrccgcgtctagggccagctgctcatcccagacgcacccaggtgattcccatgctgaacagtttgatctcctgccagagtgtcgggccacaaactgggcagcacatcaggatcacctgggggccttcaaaaatcaaaaatccacccccaggccatgccctggacccactgcaccaggacaagaaatccaccccaggcctctccccagacccactgcaccaggacaagaaatccacccccaggccacgccccagacccactgccctaggatgtgggggtgggaaccaggtggtgctttgtaaagacgtgcaggtggtaaccccaggcccccacgctcggaaccctggccacaggatcatccaggtgtctgtgatttgcttcctcggtttcctttgtgagtggaaaataagtgttgcgtttgactagggtttaagagcagcaggcagcccctcagctcagcaggcagccccctcagctcagcaggcagcccaggtctcctgtttgacttctagggaccatgctggcgggaatgagaaactggtcaagctggagtcgggactgaaggtgtacgggggtgacgaccgtatcggggccctgactcacaagatcactcacctgtccacactgcaggtaaggagtgagccctggaggtgctccagcgtggccctgtcaggagcgtgggggaggggggtccctccccgcattctctctgctcccttaccccagtgacccgggagtgctctcagtggtcctctgtggcagcgtggatggtcttctctgtctaggcacaaggagaggagtgtgcaaaacgcggctgtgtgcggggctgtgaagcagggctctgagaccctggggagcgggccatgtgggcagggtcttggtgccagagcacagcacacaggtgggagggcmctgcgagggkgtcttyagccttttkgagggtgtgaacatttttgaagtaaagaattggggcagatggggacaggaaaacaaaaggccatgtgtgggaaggaaagccgtctttcctagccagacggcgagcgtggatttggcccagttttgaaggaggaaacaagccccttggttttttacacgctcttgytccagggtggccctgcacttggggcgcacccatggagtgagcgagtcccccagtcccgtggtggggagcacctgccccaccttcacgggcatttccctcrgagctgaggaggcccagtagggcccaggcggcgcgccgtgaccccgggagatggctctccagggtgtctgggagcacacgcggtcgcctgctttgttgaaggtggggtctctgaacgtcaagtgcctggcgaccccgtgccacacttcaggacacatttgttacttcgtgagcaagcccggaggctcggagccccctgccgtgttcacaggtgcgtgttcgagtgtgggtgggggcgggggttcttcgtgaagaccctgtgtctcctgccaggcaggctcacggggcagcttcgtggccttctctgttgcaccggtgtgagggggcccaggggtgggtgctggggagcctcatggtggggctggccgattcctcccatgatgggtttggatcgtggtctggaaggaagttacgcttgcagcaagggctgtgctggcggagactgctggacagctggggtccgggcgggtcccacgggaaaggagtcagtttcttccagcagggcgaggggtggctcagccctggggctgtgttccttgatgccgtagtgtggactcagggacctgtgctagtctgggggccctgcctgcctcccagggtggttgcagacctgtggagccacctgtggaggtcatatggccgggggacggcctcactgtaggccgggcccttcatggctkcggccttctaaggcggtgcggaggctgctggtggtgggggctgcctcccgtgcttgttactgtggccttgtcccgactggcctcacagtgcgrggtttcacccggtgactcgatgtgggccttgtacggctgggaggcctcctggtgggaggtggcagccccagccttgaacccaggtgggagtgacccagggccacactcggacccctgggtggagtcaaaccaggggtgcagggagaaggtgtggccagggagccccagaggagggcggagggcatggcgggagggacgggcgcctcgctgtgagggataaggtgccttcaggctgcagtgcgcagggctgggggatgagcctgggtggtgccggtgtgggagggatggagttggggacctcagatttaggattcttctcagggcagcgagcacggagtccctgggtctcacctgtgcctcctgggctgtgtgcctggcgcaaggacagccctgtggagcagaagccccaggccccaagttcgcctctgtctgcccttccctatctctggggactccatggcctcctgctggtcctcagactcgaggtctagggcccttcaggggaacaggctccccaccgtccattcccatctctcgtgcccagaaggactcctrgccttggcctgtgcccagcaccgctgcatgcttctctgccccaggtggtgagaagtggggcggcctccactgtgctgggtgctgggcaccctcctctcaggggactgccctgtttctggggcagacggccacgtgaggtcagcgaggccaggacagccgcgaagcagcaagaggagggcaagcggggacagaggcctgggcagtgatggggtggggatgccgtcctgaggccgaggccggaaggagcctgggtgcgcctgaggtgcccagcggtgtgggccgcatcttccgccatgggtgagaggtggtcccgctcagctcagccagggtggtgagaccttggtcacagggtggcgctggctgctggggccaagggaagatgggagccaggcatgggcctgagaggggctgctgcgtgtttggggagagggctggatttgtgagggtctcagagccacagttggtgggattgggggcagtgagggaggagtgacttgggtttcgggtctgctcggccagttgggtggttggactgtcagctgagacttggaaggagatgtgggagccggaatgcaggggggctgagtctgggcagccgtggccggagggcagccagggttcggggcctgggccttgccggtgagtgtcaccctgctcctggccccctcctgagtcctagccaccagcctcaagtggcccccacctcgtggctgtccttgtttccaggtgacaccttgtttgtggctggctgcgggaagttctatgaagggactgcggatgagatgtgtaaagctctgctggaggtcttrggccggctccccccggacacagtaggcagcgcctccctgcgggccggggtgtggggggccttaaccagggcgsggctgctctccctcctggcaccctctcaccggacaccccccgggggcatccaggtcccgtccctgaggactttcacrggtggtaacagccttccgagctcacstgtcacctctctcctcagagagtctactgtggccacgagtacaccatcaacaacctcaagtttgcacgccacgtggagcccggcaatgccgccatccgggagaagctggcctgggccaaggtgagtggggccgtcactgcrcagtgccttcctgtgggctgctcagggccgctgtgcacagcggggtcgccagagtgggtagacactcacactctgagcccagagagcaggcctgggattcaggccagtgtggcccagctcgccctgcacggcaaacccaggggttctatggagatccctctgcctcggagggtctggagtaggcctcagacgctgcgtgtgtaaaaagygcccagcctgttcccacattctgagcagtagggtcaggctggcagcacgtggctctgctggctctccaggccacagaacgtggctctgtgtccaaaggactcttatctccacggtggccccacgtgagcctccatggcgtagcccaggccagctgggccaaagtctgccaggagcaggacggggttctccaggggtgtgtttccccgaattcactggaaacggtgtcacaagcacgcacgcctgggtggtctcaggcgtgggctccctctgctgagtggagtgagagtcgctgcctctgacmgggttgttttaaataaatcacccggttttttgagcatctttttcaatttcttagagtagaggttaacattattttacagtatttactcatrcaaattccaactctaaatcagatgaatcataaatactcatcttttttttttttttaatttttttttgagacggagtctccctctgtcgcccaggctggagtacagtggcgtaatctcggctcactgcaaccagcacctcccgggttcaagaaattctccctgctggccgggcgtggtggctcacgcttgtaatcccaactactcaggaggctgaggcaggagaatcgcttgaacccaggaggcagaggttgcagtgagccaagatcgctccactgcgctccagcctggtgacagagcgagactccgtctcaaaaaaaaaaaaaaaaaaaaaaaaattctccctgcctcagcctcttgagtagctgggattacaggcgccagccaacacgcccagctaatttttctacttttagtagagatagggttttgccatgttggccaggctcgtcttgaactcctgacttcaggtaatccgcctgccttggcctcccaaagtgctgagattacaggcgtgagccacgtcacctggcccgtgtgtctgtcttgagtggacagattgcagtttgaggaatgttgatgatgtttgcacttgtgtaatcccctccacagtccagatgtggaacttwccactaccccaaaggctcctgtgtccctcccatgtggcgtccccgccagctgttgctctgctgtgacctcaggtcactttctagtttcccatgaacagaatctcatygctccgtcatctctgtggcattctcggccccgctgatgttggtgagggtcagccacgctctttgcttctgagtagcccattgtgtggaaatgctacaatttgtttatgcatttgtctgtttccagttttttgctatttgaataaagctgctatggacatttgtgtacaagtcttttgtgaacatgtttttattgctcttggatactacctaagagtggaattgctgtgttgtgtggttaaaggtgtgaaccgttttccaaaaatggttgtactgttctacagtcccccaccaatgcttgagttccggggcctccatgctgtgccagcactgcttggtgttgtcggtctctccaatttttgccattctaacttgcctgtggtggcgtctcactgcctttaaaatgtggatttccccatgactagtggggttgaccatcttttcatgtgtgtcgrcctttggatgccttctcatgaagtttatgttcaatcttttgtccattttaaatattgggtttggcctgttgggctgctcttgtaagagttccttatatcatctggaaacaagtctttgtgagatatatatatatakgtgtgtgtgtgtgtgtgtgtgtgtgtgtgtatatacatatatatatttatttgtttgttttttgagacaaagtcttgctctgtcgcccaggctggagtgcagtggtgtgatctcatctcactgcaagctctgcctcccgggttcaagccattctcctgcctcagcctcccaagtagctgggactacaggtgcccgtcaccacgcccagctaattttttgtatttttagtagagatgggtttcaccgtgttatccaggaaggtctcgatctcctgacctcgtgatccacccgcctcggcctcccaaagtgctgggattacaggcgtgacccaccacgcccagctgagatatatatttaaaagatgtttttctctcccagctcatggcttgccttttcattttcttaacattgtcttttggaaaatagtttatagttttggtgaagttccatttacttattttttgtttgtttcttttttttttttttgagacggagtttcactcttgttgcccaggctggagtgcagcggcgcgatctcagctcaccgcaacatccacctcctgggttyaagcgattctcctgcctcagcctcccgartagctgggattacaggcatgcaccaccacacccggttaattttgtatttttagtagagatggggtttctccatgttgatcaggctggactcgaactcctgacctcaggtgatcygcccaccttgggctccaaaagtgctgggattacagatgtgagccactgcgcccggcctactcaatttttcttttatgtttcttgtgccctttctaagatatctttgcatacccttagctcacaaagactttctcctgtgtttcttcctagaagttttaaagtcttagcttttatatttacaaacaatttacagtgttccctttcaagatggtgtttgtgtgtggtgcgaggtgagggtagaggttcaccctctcgcagtgtgatcccgasgtgttcagsgctgtctgtcgaaggactgtcctttcctccctggattgccttggcacctttctgaaaagaatgggccctctatgcccgagtctgcttctggtctctgctctgtttcgttggtctctatgacttgccacggtgtccgaggacagcaccttgatgactgtaactctgtgctgagtcttggcactggtatgtgtgaatcctccagtgttctttttcaaaatggttttagttgttttaagccttttacatttccgttttcagaatcatctcgtgaacttctatcagaaaagctagcctggctgctgattgggactgttgtgataactgatgtggcgagaattgcgatcttaacattgagtgtttctgtgagctttccatctatgaatgtctttagcttttctcagcagtgttttgaaatttgcgtgttcaaggtcttgcacgtgttactaaatggrtccctaagcacttctggtcatgattatttgttgatactagttataaatacagtggatgcgtattaacttcctgggtgtcttagtctgtgtggtgttgctataaaggaatacttgaggccgggtgacttataaaaggaggtttatgtggctcatggttatgcaggctatataagcagcatggcctgggcgtctgcacctggtgaggcctcaggctgcttctgctcatggcagaaggcgaaaggagctggtgggtgtgaagcatgtggccagaggaaggagagagtgggggaggcaaaagtttcttttaaacaaccagatcctgtgggaactaacagcaaaaactcgcacttggagcagggcaccaagccgttcacaaaggattccccccatgatccaaacacctccattaattgggratcagatttgagcatgcgtttggagggatggacatcccagccgcagccccgtgtgaacacccaggagaagggagtggccgggctggaygggaggtgtgtttgacttttaaagaaactgccaaactccccttccccggtgcttgtggtgtttgctttcctgctgggaaggcgtgggcacaccagctggtccgtgtctttcggcacaccacacggtggagccagcccacgcggtggagccagccgtttgaaaggaggtgctggagcccagtccctggtgagaggccgcctcctgcagggcgcctcccattctgcggcctctggttttcttagcagtatcttttgagccaacatttttaattttaatgaagtccaatagattyttttatgcttcattcttttttgtctcccatctaagaaatctttgtttatcscaaggtcaaaaaattttctcmtgtattttatttttggaatttgtatagttttaaaacttagtatgaactcccaccccccaaatgtctgctggatctgtaatgatattcctgctttcattcctgattttgacaatttgtgtgtttttttttgttttttgtttttttttttttgagacagcgtttcgctcttgccgcccaggctggagtgcaatggcgcgatctcggctcaccgcaacccctgcctcccgggttcaagcgattctcatgcctcagcctcccaagtagctgggactacaggcatgtgccaccatgcctgggtaatttttatatttttagtagagatggggttttaccatgttggccaggctgatctcaaactcstgacttcgtgatctgcccgcctcagcctcccaaagtgctgggattacaggcgtgagccactgtgcctggcctgtcattcttttttttttttttttttggttggggagagacagcgtcttgctctgccgcccaggctggagtgcagtggcacaatctcggctcactgcaacctccgcctcctgggttcaggcgattctgctgcctcagcctcccgtagctgggactacaggcctgtgccatcatgcytggttaatttttgtatttttggtagagagggggtttacascatgttgcctaggctggtcttgaayttctgggctcaagtgatcctcctgccttggcctcccaaagtgctgggattacaggcatgtgccawccacgcccggcctcattctttttgataggtgtaaaatatactattgcgtgggtgtcacccataaatcattttaccaatcccmataggagggacgttgagagttttcaactccttttgcaccctggagtccagaacccacacgaggtggagctcttctgagctgtgctgcaaggactgaccttatttttttatttttatttttttgaggcagagtctcactctgtcacccaagctggagtgcagtggtgcgatctcggctcactactgcagcctccgcctcccgggttcaagcgattctcctgcctcagcctcccaagtagctggaattacagacatgtgccaccacgtctggctaatttttgtatttttagtagagacggggtttcaccatgttggccaggccggtctcaaactcctgacctcaggtggatccacctgcctcrgcctcccccagtgctgggattacaggtgtgagcaaccgcgcccggcctgttgttctttctttgggagacagtgtcttgctctgctgcccaggctggagtgcagtggcatggtcttggctsgctgcagcctccacctcctgggttcaagtgattctcctgcctcagcttctccagtagctgggattacaggcgcccgccaccacacccggctgattttttctattttagtagagatggggtttcaccgtgttgcccaggctggtctcgaactcctgagttcaggcaatccacccacctcggcctcccaaagtgttaggattacaggcgtgagccactgcgctcggctgactgaccttatttttgtctttaaatgcttcgtactttgtaggaaaaatagctagaacattaaaactcgttttaataggtaacctaaaagcttatgacaatttgtacttcctctgttttaaaggtctccttagaagtgttaactttgcttccctcgtaggaggcagagggagatttcttaggattgagaatgttggtgggaacacagggaatattttaaaacattctcagattcttttcgccagaagggaagaacagattagtgagaaaccatcttggcatctaccagacccccgcttggtgcagctctaccagctgaagagtcactsaccgacaccactgcccatagcgggtggggaacctcgggggtgaggcgcggtggtcttgagcctgtgcgtgggcaccagcagcttctgtcagagctctgccctgaggccctcctggtgcggctgcggtagaagggccggggctgtgtggagaccccgctgttgccgccctgtgttttcctgctaactgttggccccgtggctgggtttgcattctcctccccccgcccccaccccatctgccctggtcagtgctggtcggaagggagaccatctccatctcgagaggaggtgaccagctgcctgcctgcaggggcttgggtggcctcccctgctgctggtccctgtgcccctcctccccgtgcttgctgtgaggstgcagctgtggcggtttcttttctgtgtctcctgcattgctgttacctccataatgtgaaatgtaaaccatgtgaatgaaaaggaagctccgtccctgtcgtcctctccaggccggtgcgggaaggcggatgtgtggctcatcccggacgctggcttctcttccctcttccayacgcgcacacccgccgggstctgctcaccttgccttctcagccttgtcagtcgggcagtgtsctaaggttaccaggaggtgttctgaagcatcttttttgagacgtgatgtcgctgtcacccaggctggagrgcagtagcacagtcttggctcactgtagcctcgacctgtgctcaagmgatcctcccacctcagccccctgagtagctgggaccacaggtgcctgccaccatgcctgrctagttttttgtatttttagtagacacagggtctcgccatgttgtccaggstggtctcaractccagggctcaagtgatccatctgccttagcctcccaaagtgctggtatcacagacgtgagcctccgtgcctggtctgccatcctgtgaagttcccgtgataaagtggygcgtttctcttgcaggagaagtacagcatcggggagcccacagtgccatccaccctggcagaggagtttacctacaaccccttcatgagagtgaggtgaggcccagggcaggtggtgggygcgggcccctcccctctggcagtcccactgctgcacacacagccggtacgtccgagaccccagatggctgaggctgccttggggagctgtcrcaggtgcagccgcagagccygagcactcttcttgaggggggtccggcctttcctggcaccttggccggrgtgtgagtccttctggaccctggagttcagaacctgtcagaaggggagtggctgccgcctccccgccctccgtgtcctctgagggckgggctyggccagcacgagtcgccttcctctgcagtggccctggctcctcsggtgggcgtggctcggcacagcctgcagcccggtgctggcctccgcagggagaagacggtgcagcagcacgcaggtgagacggacccggtgaccaccatgcgggccgtgcgcagggagaaggaccagttcaagatgccccgggactgaggccgccctgcaccttcagcggatttggggattaggctcttttaggtaactggctttcctgctggtccgtgcgggaaattcagtcttgatttaaccttaattttacagcccttggcttgtgttatcggacrttytaatgcatatttataagagaagtttaacaagtatttattcccataacttccccytgcagactgttttcttctggcctttaggcctctgcttgtcccctcgggcctccttcctcctccrtgagccactgcagtccccccacccacgcttcaggtcaggcgtgagccggtgcctttgctgtggccttggctgggtgctgatgsgactgtcaggcccactgctgcggtcggtacctttgcagcctgtgcttgtggtctgatctgytcaggcccccggcagggagaggtggccgcgtcttcttcctggaggcggccagatcgcgcgacctccaggcagtgctcctrctyggcagcacccacctgcctctgcttgagaaagcacaaacygccctctggggaagcagccagctggggagtgctctcggcctgtgaccccgggagggctgggtaggtggccacatgtcctgccccggctctgggtgtggctggtggcagagggtctatgagggaagggcaggaaaaggcaacccctaaggctaatctgaaatttagggctggggcgtggtggctaagcctgtgatcccagcactttgggaggccgaggcgggtggatcacgaggtcaggagatcgagtccatcctggctaacatggtgaaaccccgtctctactaaaaatacaaaaaattagccaggtgtggtggcggacacctgtagtcccggctactcgggaggctaaggcaggagaatggtgtgaacscrggaggcggrgcttgcagtgagccgagatmgcgccactgcactccagcctgggagacagagcaagactctgtctcaaaaaaaaaaaaatatgaaatttaataataatmtttttaaaaagttacctgggcagggtggtgtgcagctgtagtcctagctactcaggaggctgaggcaggaggatcgcttgagcccgggagtccaaggctgcagtgagcattgcttgtgccactgcattctggcttggggaacagggagaccctgtctcaaagaaattaattaatcatgcagttgagtggtatttagtccattcacaatgctgcagccrcctctcgcgtgttctgaaacatttgacctattcactgactgactgactgctctstcagtgagctgtgaggggaggtgactctgtgtggggcccacaccctctgccacctggtcctatagacagactcttctgagtggaggggcagagcggccctgggacctaggagcaagcctggcccgaggcttgtggattgaagaggaaggctggcactgcacttctagaccacatgcatgccctccccccggaggggtcactggtctgttcgcatactcgcagacccctctgggatgccacggaagccaggcgtgtgtgaggaggcagggcagactgcttctccggctttcttctcccactacccccrccccagcgcaaagagtttgttctattgttcagcaaatattcttaggccagaatcttaaatgtttccattctataacaaacactgtgctcatttgtcaaccaataagtaattttaacagccctctttggatgcaacaaatgcctgaacatctgatcttttattttcttgagacaggatctcgctctgttgcccaggctggggtgccgtggtgcaatctcggctcactgcagcctctgcctcctgggctcaagtgattctcttgcctcagccgcctgagtagctgggattacaggtgtgcaccaccatgcccggctacatttttgtatttttagtagagatggggttttgccacgttggccaggctggtcttgaactcctgacctcaggtgatccacccacctctgcctcccaaagtgctgggattacaggtggaaggcactgcacctggccttgatgtctgatctgaatggtaggggtggtggggcaggcagtagttgtgggagttgacagtgcttagagggaaatttatagctttaaccacctatgtaataaaagggggtctcaaataaaaaatgttgggcagggtacggtggctcatgcctgtaatcccagcactttgagaggctgaggcaggcggatcatgaggtcaggagatcgatactatcctggctaacatggtgaaaccctgtctctattaaaaatacaaaaaattagccaggcgtaaacttgggaggtggagcttgcagtaagccgagatcatgccactgcactccagcctgggcaacgaacaagactgttgtctcaaaaaaaaaatgtcttcgaccaggtgcagtggctcatacctgtaatcccagcactttgggaggccgagctggacaaatcacatgagttcaggagtttgagaccagcctggtcaacatggagaaacctgatctctactaaaaatacaaaaattagctgggcgtggtggcatgtgcctgtagtcccagctactctggaagctgaggcacgagaatcgcttgaacatgggaagcagaggttgcagtgagccaagatcatgccattgcactccagcctgagtgacagagtgagactttgtctcaaaaaagaaaaaaagtacaattctaccttaaattagaaagaacaaatgaaacctaaagaaagattagagaggaaattagtaaactagaaagcagaaaaaccaaaagagttagttccttgaaaagatcaacaaaattggcaaactcttagctagactgactaccagaagcatgaaagaggggacatcactaccaatcctacagaaatgaacaggacttggccgggcagagtggctcacgcctgtaatcccagcactttggaaggctgaggcaggtggatcacgagatcaggagatccagactcatcctggctaacatggtgaaaccccgtctctactaaaactacaaaaaattagccgggcatggtggtgggcgcctgtagtcccagctactagagaggctgaggcaggagaatggcatgaacctgggaggtggagcttgcagtgggctgagatcgcaccactgcactccagcccgggcaaaagagcaagactccgtctcaaaaaaagaaaaaaaagaaaaagaaatgaacaggacttggaatactaggaaaactctgtaccaacaaattaggtgaaactgacaaactcctagagggacacaaatcacttaaattggctcagaaatctgagaaatttaatagaaaatctaaatagacctataacaagaaattatagtaatgaaaagtcctgagtcttcctacagaaagcctgtgcccacgtggctgccactgtatactgtcaataacaccaaccattcacaatcttcagaatgtggaggatgagacacgcccatctgagtctaagaggctaaaggcagcgaaaggcatcataatccgtgcccccaccccacagaacaatgtccatcatgaatacagacataaagatccttaacaaaatattagcaacccaaactcggcaacatcatacaccaagaccacgtgggtgtatcacagcaaagtgaggttgcttaaacatctacgaagcacttaacgtcataagccacattaatagaaaaacagatgcctgtaatcccagcactttgggaggctgaggtgggcggattgcttgagcccaggagttcaagactagcctgggcaatatagcgaaaccctgtctctaccaaaataaacaaacaaaaaaaacaaaaattagccaggcatggatgggagtgcatgcttatggtcttagctactcacaaggctgaaaccagaggatcatttgcgcccaggaggtgcaagtccagtgagctgagatcgtgccactgcactctagcctgggaaacagccagagcctgtttccaaaaaaaaaaaaaaaaaaaaaaaaaaccacccacaagatacatctcaatcaatgcagaaaagcacagcacaaaagtcccacacctgttcctgataaagactctcacaacccaggaacagaaggggaagtccccagctggaaaaggccatctgtgttaggttccagttgctgctgggataggtcaccgccacctcagtgatttaaaacaacacaagtttaggccaggtatggctcacacctgtcatcccaacactttgggatgctgaggcgggtgaatcacttgaggtcaggagttcacgacaagcctggccaacatggcgaaaccccatctctactaaaaatacaaaaattatccaggtgtggtggcacgtgcctgtaatcccagctacttgggaggctgagaccagagaagtgcctgaacccaggaggtggaggttgcagtgacccaagatcgtgccactgcacttccagcctgggtgacagagcaatactccatctcaaaaaaaaaaaaacaaacccaaaaaccaaaacccaagtgtaccttgcggtttggaggtcggtagtttgacatgggtctcatgggactaaaaggaaggtgtgggcagggttgcgttccctgcagaggccctgggggaggctctgtatccccatcctttccataggcacccttggctcgtggcccttcctgccatcttcaaagccagcaacagcaggtcgagtcctccgtgcctcaaggcaactcctcctctgcttttaaggaccgcgcaactccctaggttcatctggaaaagccatgctactccattttggggaactgacctgaaattggcaccgcctcttgttggtgtggcctcacatcatcccagggcccaggggttagaatgtggccatctttgcggtgagcactattctgcctcccatagcatccgtgagaaacacagctggcagcgtaattcatggtgggtgacgatggttccctctaaaggcaggaacaaggggtttaataagatgctaaatatatatatttaggaaaggaaaaggtaaaagtgtctgttcatagcacgaggatcctctacatagcaaggcctacgggacacacacaaccggaacaaggaagttcagctgggccccgggacccagagttaacagattcattgcctttctatagactacgaacaatccaaacaaaactaagacgccattcactagcatggaaacgagaacacacacttaggagccaccttggtgaaggaaactgaagatttatacactgaaaatacgagacattgctgagagaaatggaaagacagcccacgttcattgggtaggagactcctattaagatttctgtctccccagatgggcccatagatcccatgaagtccctattaagatcccatcagcggccagacacggtggctcacacctgtaatcccagcactttgggaggcagaggagggcgaatcacaaggtcaggagatagatagagatcatcctggctaacacggtgaaaccgcagctctactaaaaatcaaaaaaaaaaaaaaaacaattagctgggtgtggtggcgggcgcctgtaatcccagctactccagaggctgaggcaggagaacagcgtgaacctgggaggcagagcttgcagcgaaccaagattgcgccactgcattccagcctgggcaacagagcgagactctgtctcaaaaaaaaaaaaaaaaaaaaaatcccaccaggtattttggagaaagtgacaagcagacaagcagattctaaatttatatggaaatacaagaatctagacaagccacaacaggtttgaaacaggatgagttggagggctcaggctgcctgatttcaaaactcactataaagtgtgagtggcaggccaggcatggtggctcacacctgtaatcccagcactttgggaggccgaggcagggagatcacaaggtcaggagttcaaaaccagcctgggcaatatgctgaaatcccgtctctactaaaagtacaaaaattagccaggtgtggtggcgggtgtctgtagtcccagctactcaggaggctgaagcagaagaactgcttgaacccaaaaggcgaaggttgcagtgagctgagatcatgccactgcacttcagcctgggtgacagagtgagactctgtctcaaaaaaaaaaaaaaaaaagtgtgggccgggcacagtggctcacactctgcaatcccagtactttgggaggccaaggtgggtggatcacctgaggtcaggagtttgagaccagcctggccaacatgctgaaatcctgtctctactaaaaatacaaaatttagccgggtgtggtggtgcatgcctgtaatcccagctaatcgggaggctgaggcaggagaatcgcttgaaccaggaggtggaggttgcagtgagctgagattgtgccactgcgctccagcctgggccacaagagcaagactccatctcaaaaataaagtgtgacagtggtgcaaggaagggcatggagaccagcaggtcggagtctagaataaatccttgtattcgaggccatctgatttttcaacaaagatgccaagacatttcagttgggaaaaggagagtctaacacatggtgttgggacaattaggtatctgtggaagaagtgactcgagacccttcctcatatcctcataaactaactcaaaacggatcacagacctaaatgcaatagctgaagccatcagactttcagaagcagctgcaggagaacatctctgtcatcttgggttaggcaaagagttgttataggaaagaaaaaatcagttggaacttgtcacagtgaaaaacttttgtactttaaaaagacaactttttttttttctttttgagatgaggctttgccccgttacccaggctggagtgtagtggcatgatcgtggctcactgcagcctcaagcaatcctccagatccagcctaagcctcccgagtagctgggaccacaggtgcataccaccatgtgtggctaatttttgtattttttgtagagatggggtcttgctatgttgcctaggccagtcttgaaatcttgggcttaagcaaccctccagcctcagcctcccaaagtgctgggattatagatgtgagccaccacactgggccaaaagacagctttttttaaaaaaatagagaagctacaggctgggaaaaatatttgccagtcttttttttttcccgcttgttgatccatcactaagagttataagtaatatacaaagtcttacaactcaagaacatacccaattaaaaatgggtaaccagcagctttgtacatgttaaaaaaataaaaacaaaaagattgacttagattatgtcaccaaagactgacataagaatggccaataaacacatgaagaggtttgacatcactagttaacagaaaaacatgagttagaatagtttacaggaacataccaaatgctggtgagaatgtgggacaactgcaacttgcatactttgtaaaacagtacactcgactgggcgtgggggctcacacctgtaatcccagcactctgggaggccaaggtgggcagatcacctgaggtcaggagttcgagagcagcctggccaacgtggtgaaactccatctccactaaaaataaaacaattagctgggcatgatggtgggtgcctgtaatcccagctactcaggaggctgaggcaagagaatcgcttgaacccaggaggtgga

SEQ ID NO: 96135 - DNA, 14474 bp, Homo sapiens
agccaccatgcccggcctgcattatttcttacaactacttgtgaatctacgattaaaacaacaaaaactaactatatacataggcgtacatatgaaataatggtacatgaaatagacccgaaatggccaaaaagtgcagatgtcctggcaggtggtttgaaccgagggcttggggcgctggcctttgaatcctagctcctgcgcttaccgccccggtgactggaccaggttcctcactgctttgtgcctcaatgtcctcatctgcgagctggggccatgacagaacccgcccrgaagccctgcctgtgctcagcgtccaccccaattcccgggggcgaggcctggtgctccctgggactgtggccctgtctggaccaaaagcgtgagttctggctccgagcatctggaaggttcagccctccccctcccccaagggtcccaactgtgactcactgagccccggccggtgcacctcccgcagggtgtgggtcatgcccgccttgtagcccaggaaggccgtgaggtgcacgggctggctggggtcatcccgcggccacgtcttcaccttgccccggtgccggtggctcctcttatggggcaggaagcccaggtgtccgtgccgaggggcggaaaacttccggtgggactggggggcaggaaggaaggaggtcagacctggggtgtccctggtggtagagctggatggtcccagaacccatacctggagaaatggactacaggcttcagactgaggcctgtgctcagcacctcccctgtctgcctacaggaggggagaggaaggttcaccaaggggcagcgtctttgggatggggtctccatagccacaggcttcctgcctctgtgggctcagcctggggcccaggagggtcgcacccatactgcagccaagggctcctggggcaggtggccgctgccatctgttcatctccagggccctcccaggcccaggagcccagccctcgtccccttgtttccccctccagcctcccatcccctcacaggctgggagactgtccctctgagggagcatccagaagcccagctgtcccacccccccagagttccagctccaaccccagcccaccctcaccctggtcccaccaaccatggtggccgatccctgaaggtcaggaaggggcctcgccgctagccgccagaggtcgagtggcagggccaggactcasagctgccagytcccagattagcccctggcacagtcagcagggtctccggtgccaggagcaggcaggggcggggcagtgttgggggcatcagatagacagcctgagtggggcacccggagccagggctggcactcctttcctcgatggccctggggctgggtcatgaccctcccaggacaggactggccaggcaaggtgggggccaaggtagccggtgggggccttctcccaggcagcggccaagaggaggggtctggagcagtttgccgacttggaggcagagggggttcctgtcctgagggctgggagacagctggataaacagcggggagcagggctggggacagggcagacgagggggagggctgactgcaccttgaggatcaccagagctgtgcttccagattgagatccctggctgagtgcagtggctcatgcctgtaatcccagcactttgggaggctgaggcaggaggatcacttgagcccaggatgtcaggccgcagtgaaccttgactgcactccagcctgcgtgactgagcgagacactgtcttaaaaacaaaaaaaaagccagcctggccaacatggtgaaaccccatctctactaaaaatataaaaattagccgggcgtggtggtgtgggcctgttaattccagctacttgggaggctgaggcaggagaatcacttgaacctgggaggcagaggttgcaggttgcagtgaggcgagatcgcgccgctgcactccagcctgggcaatagggtaagactccgtctcaaaaaaaaaaaaaaaatcaagatctgactcctgtcattcacaatcattgaaatacttttatgaatttatcttttttatgtttttgagatggagtcgctctgttgcccaggctggagtgcagaggcgtgatctcggctcactgcaagctccccctcccgggttcacaccattctcctgcctcagcctcccaagtagctgggactacaggcgcctgccaccacacccggctacctttttgtatttttggtagagacgaggtttcactgtgttagccaggatgttctcgatctcctgaccttgtgatctgcctacctcagcctcccaaagtgctgggattacaggcatgagccaccgcgcctggccttatttaaagagacaatgtctcattccatggctcaggctggaatgcagcggtgtgatcatacctcacttgcagcctcaaccttttgggcttaagtggtccttctgcctcagcaggacctaatttttaaatgtgttttgttgtagaggcgggcgtctcaccatgttgcctaggctggtctgaaactcctggcctcaagtgattctcctgcctcagcctctcaaagtgctgagattacaggtataagccacagtacctggccaaatttaaattttgaatttaagttttgaatgaagagggggttgaaatcttatttttttttcttttttttttttttttttgagacagggtttctctctggtgcccaggctaaaatgtagtggcacagtaatagctcactgcagcctcagtctcctgggttcaagcaatcctcctgccttcatccccctgagtagctgagaccacaggcacttaccaccatgcctcactaatttttgtattgtttatagagatggggatctcattatgttgcccaggctggtctcgaactcctgagctcaagcaatctgcctgccttggcctcctagagtgctaggattacagatgtgagccactgcgcccctcaaaatctttttcaattcaaagattctatggttgtaaagttttgttttttttgtttttgttttgagatggagtctcattctgttgcccaggctggagttcagtggcacaatctcggctcactgtaacctctgcttcctgggttcaagctatcctcctgcctcagccccactagtaactgggattacaggtgtgtgccaccatgcccagctgatttttgtatttttagtagagatggggttttgccatgttggccaggctggtcttaaactcctgacctcaggtgatccacccgcctcggcctcccaaagtgctgggattacaggtgtgagccaccccgcccagccagttgtaaagttctatagcagtggaattctagagtttttcaggcctatgacatctctaagatacgtggttcttacatcaatagatactaagattctaggctactaaaatgtcaagattgtttgggtctcatggttcatatttctttccaagactttggccaggcacagtggctcatgtctgtaatctcagaactttgggaggccgaggtgggcagatcacgtaaggtcaggagtttgagaccagaaacatggtgaaaccctgtctctactaaaaatacaaaaaattagccgggcgtagtggcagacacctgtagtctcagctcctcaggaggctgagacaggagaatcacttgaaactgggaggaggaggaggttgcagtgagccgagattacgcgctgcactccagcctgggcaacagagcgagagaactgtctcaaaaaaaaaaaaaaaaaaacaaaaacaaaaaaagaaaaaaaagttcataatgtgaagaccgaacgtttctgtgaccgtagatcctgttgtgtccggaattggtgagttcttggtctcactgacttcaagaatgaagccacggaccctcgcggtgagtgttgcagttcctaaaggcggggtgtccggagtttgctcgttctgatgttccgatgtgttcggagtttcttccttctggtaggytcgcgctctcgctagctcaggaatgaagctacagaccttcgcggtgttacagctcttaaggcgccgcgcgtctggagttgttcatcctgccagtgggctcgtaatctcactggcttcaggagtgaagctgcaaatcttcgcggttgagtgttacagctcataaaggcactgtgaccccaaagagtgagcagcagcaagacttactggaaagagagaaagaacaaagcttccacactgtggaaggggacccgagcgagttaccactgctggctcccgcagcctgcttttattctcttatctggccccacccacatcctgctgattggtagagtccagtggtctgttttgacagggcgctgattggtgcgtttacaatccctgagctagacacaaagcttctccacatcctcaccagattagctagatacagagtgtccacacaaaggttctccaagtccccaccagagtagctagatacaaagtgtcgattggtgcattcacaaaccctgagctagacacagagtgctgattggtgtgtttacaaaccttgtgctagatacagagtgccgattggtgtatttacaatccctgagctagacataaaggttctccacgtctccaccagactcaggagcccagctggcttcacccggtggatcccgcacgggggctgcaggtggagctgcctgccagtcccgcgccgtacgcccgcactcctcagcccttgggtggttgatgggattgggcgccctggagcagggggcggcgctcgtcggggaggttcgggccgcacaggagcccacggagtgggggaggctcaggcatggcgggctgtaggtcccgagccctgccccgcggggaggcagctaaggcctggcgagagaaatcgagcgcagcgccggtgggccggcctgctgggggacccagcacaccctccgcagccgctggcccgggtgctaagcccctcattgcccagggccggcagggccggccaggctctccgagtgcggggcccgccgagcccacacccacctggaattcgcgctggcccgcaagcaccgcgcgcagccccggttcccgcctgcgcctctccctccacacctccccgcaagctgagggagcccgctctggccttggccagcccagaaaggggctcctcaagtgccgccaaagtgggagcccaggcagaggaggcgccgagagcgagcgagggctctgaggactgccagcacgctgtcacctctcactgtttgtctgtagggttgatggttctgtgtcgctggcctcaacctcaggacaggacatgaccagtgtcccccctggatagcagccaggggccgtgccaggtgtggagactgaagatgtggccagcaggaccctgctcagtggagctgcctagaagcaccagagtgccccagggccaggatggaaccatcaaagccggccagagggccctgtgcccagggtaggtgccttctccctatgagccgcctaagggcaagccctgcctcctggtctgctccctgccctcccccagacaggctcccaagttaactggcaccagccagtccatgaggggcccttgtagagagcggggcccagagaagtctgtagggactaggcaatccaggaaagcttcctggaggagtagggtgtttggaatcgcgtgctatttgttcactttgtcgtgtgcgctctaacggcctgtgttctccatcacagtttatcttattccctgctgcactcagcacagtgcctggcgcgcagtgggaaccgaatgaccccctcctattccttatgtcagttgccttttgtctgtttctttcatcgtaagcaggaatctgtccggttcgcggctgcttcccaggcgcccagaccagcgaccagcaccgcgtaggcgctcggcacagaccgagaacggaggccccacgcgggggcgccctgcggcgaggcgggtcccggccgcgcccggcggagccggggaactacaagtcccatggtgcatcgcggcgccagcgcgcagacgcagccgccctcggcgtcctctgtagcgggcgacctaggccgcgrgacccggacggaggtagaggcyagggcarcgcgtccgggagcggagtccgcgcccgccgccgccatgccggacagctgggacaaggatgtgtaccctgagcccccgcgccgcacgccggtgcagcccaatcccatygtctacatgatgaaagcgttcgacctcatcgtggaccgacccgtgaccctcgtgagaggtacgargccccagcccggggctccctcgccggcctctggggacccmtggatcccacaccctgcmtggatcctccaatgcctccggggtcccgtctscctgagaccgccccccgstgcaccccggggacaactccccacccccggagacctccgagctccgtcgcctcctttggcctcccactgcacccmggacctcacctcccaggatcccttactctcccctgcaccccgggatgccccgcttcttcccaggactcttccctccctgccgcacccagcgcccactgccccaggaccccgcactgctctccgccccccgccgccccgggmacccctccactgcaccgctggcctcaggcctctctcaaatgtctctctgccrgatgaccaagtgtcggggtgatggccgagatgcccaaattcascatctctggaacgaaccgggaaaatgcccagttcagtttttgttgttttttttttttcctgagacagtctcactctgttgcccaggctggartgcagtggcgcgatctcggctcactgcaacctctgccccaccccgggttcaagcgattctcctgcctcagcctccccagtactaggattacaggcgcaccaccaccacgcccagctaatttttatatttttagtagacacggggtttcaccatgtkggccaggctggtctcgaactcctgacctcaggtgatcctcccaccttggcccccaggtgctgggattacaggcctgagccaccgtgtccagcctggttcagttctttttgaacacttggggtgcatagcatgctctggtggttcttccgtaagagggtgaagtctccaaatcaaacccccaaagatctggaaaccgtgcaacagcggacccagctccctctcttttgtagcagttgtagagcatgtctgtcctatgtgtctggatgttcgagctctccttttagctcgttcatttcccagtgaggaagctgaggccgtaaggtggtaagttctgcttgctggaggctcccygttggagcctctttgcgcacccagcagggtccctgtgcagctgggggaggtgcactggcagagctgcgtcccagtccwtgccatctgtgagaagcagctgcctgtaggcttgygtgggggacagagtaaggtaatgcmtgtggaactctgaggatgatgcctggtactcgggagctctccatcagctgtagcctaggccttcacaggcctgcctggctggccacatcycttagagagacgaattgctgttttctaaacgctggaacactcaggaagttctcctcyctcccctccaaagggctyatgagaaataagaaagctaaaagcctgtccaaaccgatgaggcrtttgagtctgtggctttgtctttgcagaatttatagagcggcagcacgcaaagaacaggtattactactaccaccggcagtaccgccgcgtgccagacatcactgagtgcaaggaggaggacatcatgtgcatgtatgaagccgaaatgcagtggaagagggactagtacgtgagccatgctgggagtgtggagrtctgcaccgtgtgctgctgggacactagtccctgggatgccacagggtggcatgcccagattttaggggtgacatgggaggagccagaccccagggctcttgctttcarttgttctcacagggkacaggaaaaggattccttgtgattagcctctcttgctccttttctccaccagcaaagtcgaccaagaaattatcaacattatgcaggatcggctcaaagyctgtcagcagagggaaggacagaactaccagcagaactgtatcaaggaagtggagcagttcacccaggtggccaaggcctaccaggaccgctgtgcgtgccccacccacccccaaccccccaccatcctcctgaggcctgggggccagaaccattgcaaatcttccctcccctcccttgtgctcacttgactttgccccctttgcatgtagcagaggcctcggttcccagcttgtttccattgcttccccagatcaggacctgggggcctacagttctgccaggaagtgcctggccaaacagaggcagaggatgctgcaagagagaaaagctgcaaaagaggccgccgctgccacctcctgaggcagctgtgggtgcccytgctgtgtggctctgtatgactgttgctgaaatataaagccctgcaacctgcctgtgtgtctggtgtgatctattggccccacgccccagattcaaaccaccactaaccatgcaggacacgggaaaaaaacagtaacacgcttaattcactttatttttcttgtataaaaaccctatgttgtagccacagctggagcctgagtccgctgcacggagactctggtgtgggtcttgacgaggtggtcagtgaactcctgatagggagacttggtgaatacagtctccttccagaggtcgggggtcaggtagctgtaggtcttagaaatggcatcaaaggtggccttggctgcaaaacaaaagaaccccaggagggtcagtggtgtgcttgaggcaagtcccccaacccaaaaattgtcgcactcctaggaacagagaggccattctgggcgggtctgtcgtgcattaggagagcctttctctgcctccctgaaaacacgccaagcacacactggacccgtgtggttaagcggagctgagagaccatggctatgccccatgtgtggaccacctaccgaagttgcccagggtggcagtgcagccccgggctgaggtgtagcagtcatcgataccagccatcatgagcagcttcttaggcacaggtgcggagacgatgccagtgcccctgggtgcagggatgaggcgtaccagcacagagccgcagcggcctgtcacctggtgagggaaggagtcaggagacgggggcccgagggagcctgccccacggcaggcccatcacctgccaccagcctaccttgcaagggacagtgtggggcttgccgatcttgttcccccagtagcctctgcgcacggggacgatggagagcttggccaggatgatggccccacggatggcggtggccacctccttggagcacttaacacccagaccgacgtggccattgtagtccccgatagcaacaaatgcctgcgaaaagatgtgtgtgaggcagctggtggccctacacccaatcactgcccaccgcccagggcctgttgcacccctcaaggaaagagaggccacagtaaggcccatccgaggtcctgaggagatcttttctctctctccccgttacgaaagtcacacgggtgaagccaagtgcaactatgcagagccgagagagtcccggcaagcccagcgcagccccctccaggacagccgggtaccttgaacctggtgcgctggccggcacgggtctgcttctgcactggcataatcttcaaaacctcatccttgagagaggcccccaggaagaaatcaatgatctctgattcctgaaacaaacaagaaaattgtagggagagcattaaaaaaaaacttaataccattacgatattcaagaaccaaagtcacggccgggggcggtggctcaagcctgtaatcccagcactttgggagactgaggtgggcggatcacaaggtcaggagtccgataccagcctggccacatggtgaaaccccacctctattaaagacacaaaaaattagccgggcatggtggagtgcgcctgtaaccccagctattcaggaggctgaggcaggagaatcgcttgaacctgggaggtggaggttgcagtgagccgagatcacgccagcctaggcgatagggcgaaactgtgtaaccgcccaccccgcccaaaaaaaaccgaagaagtcatgaaccccctcacctggcttccccccgatctgtccccttcgtttcgtttttggaagcttgtatgtaaggttaccctatttctgcatctcaatcgtttcttcctatttgccctttttctcttgtttggtgagatgtggctttccactcagatttccttttgctttgtccagctttggcctagccatgaccaccgtaccttgctagggcgaacgctcacatgacaaatatgccattagcctttccccactgcacccgctggatgcagatgacagctgtcccgtacacgcggactatgacagtttgctaacccttacagtgtcctcccacaacctgaacttcatcatcctctcggatggcatgaaccaagcgctgcttctctttcagttctttggaaatgaattcgctgcgaatgtgggaagatgcgctgaaatgccttttgtggctctggcttcgctcaggtatccatccaacctctaagtggaatcctctcctcagccagcccgcaacacaacctcaacctctcacgcgagacgctgggccctttaatgcgagtcaatggcagatgctaatcctccaaccccagcccaaatgactccggggtcgcacttgctcaacgccccaacgaccgacgcgtaccttaatrggcagrgagaagagatagatctcctccagggacttgatcttcatgtccttgaccaagcggcccaacttggtgacgggcatccactaaagggagaaaaggcgccagtgaccaggaccgctctccggcgccgcccaggggccsgaccccgagcgtggctgatacctacctccttatcctcggccttgcctccgcgagctccgcggcctcggccccggccccgtccacggccgcgaccccggccccgratgccactgccgaaacctccgcggaagccaccgcggttccccatcccagggccaccagggccyccgggcccccccgctgcaccggcgtcatccgccatttgctgggaaaagcgacaagaaggaactagtcagtgtggcctacgcatctggcagccccccgcgagacccagacaagggctcccgcccaggagcgcggactcgggagcctagacccgacccgatgtccgcggattcccgccgcccacgcagaggcccgctgcagcgaccaacaggactcacgtgttttgtcggaaaagaagaacgagacctactgggaagcagcttttatagcacgccaagcgccgcgagatctccgcagccccgccccaagcgggagcgggccgagctcctataagacaacctgtgaytggctccgcggtgccccgtcctcaccgggctctgagtgctctttcccgtccggccccagccgcggcycgggaatctacgtcacccgaaaagcgactataaacgccggcgcctccgtccccagccgcggctcgggaatccacccgaagagtggctataaacgtccgcgcctccattgcgctctcctcttcacttaggtaggtcctgccgcgttgaccactggcgtctcgctggtggtcttcgagaccggcgttggttgaaaatcgcccccggctttggccgtggccgcgggtgagattcggcgcccagagcccccgggggcctcagctcaccgcgcgctgccccatgtgcggcggtgaaacccaggccccgacaggcgctgccgcctcccccccgggtgcggtcgctcgcgaggtctggcccctgactcctgaccccgactgcagacccctaaccttgttctttctccgcaggacactggtcctcccacgcctgacaccgacgtcgccaggaccgcggggttgggggaacttggctgtcccacgtctttcaaataaagctgttttgtctaactcactgcatgcgggtgttcttggggccccgactcgcctatcagcctggcaagtgcatatgttcacgctgtggcggggagaaccctagcgagatgcctcctcttctttcctggctttggacacaagggtaggatatgggaggttggcaggtgatgtgtaaggtccgacgcctcttaagtggaggagccagactacgaacagtcttgtggccatgcgcatctcaagtgaactacactggcaggtaaaatgccttggtccaaagggctccaggtggagccagcagagcactagcaaggatgggaagctcagaggcttccagtggcttccttgtgagaccaggtgagattctaaaggatttgaccaactaggcctagatgaactcagcgcccccgtggtgctaggctggagtggatcagacacctggtttgggaggctgggccccctgctctggggcggcaggttacccgggagtttagttgtcactgccgtggagctagcacctgagtatcagatcctaagtgaagacccccagtgagtcaatgcctaaaacccctaagccttaggatctccagccacctgggccgcagtattggagagaagagggtggcaatccctgtgatcccactgaagccctggcctgggggagacagctccatgaagcttggttctgacccagtgcttctggggaaacgctgtcagccactctcaagccccaggcgcttcatagacctatctcaggtcaagagctgctctcttttatttttattttattttatttatttttttgagacggagtctcgctgtcacccaggctggagtgcagtgacaccatctcagcttactacaacttccgcctcccgggttcaagcaattctgcctcagcctcccaagtagctgggactacaagcaactgccaccacacttggctaattttcttgtatttttagtagcgatggggtttcaccatgttggccaggctggttcgaactcctgaccttaagtgatctgcctgcctcggcctcccaaagtgttaggcttacaggcatgagccactgcagctagccgtatggctttttttttttttaagaggtggggtctcactgagttgcccaggctggtctcctgggctcaagtgatcctcctgccttggcctcccaaactgctgggattacaggtgtgagccaccgcgcctggctacctgtgatccttcagagaagggggcaagggctgggctgtacggggtctctgggtcctgaaccagggttgtgactggcttgagctggacaatgctattgtgatgtcagcccacacccactgtgaaatgcaggctcctgagctctgggggcctgtggagctgctgtctagacgcagatcatggtgagcctggggccctcttgcttccagccctgagatgtgtgcccaactccagaaacctgcccagttgtccagggatcgaccccactccactcggaaagggtgggcaatgggttgcagacccccatatggtacaaggaaaccttctggaaggctctggctaggtctaattccaggctaaggcccccgtctccagccagagattagtagtcctggggtggggggccctaacccccacagctgccccctcaaagtgggcgctgagccaacccctttacttgaagttctgtggcccacctccctgccaaaagcttgctgggctctcttgctcggtatgtggaccagggactggatcactgtcccagccaggtgctgacacctggcctttgcagggtggcgggtatgatctcaacctcttcgccagccctcctgacagcaacttcgtgtgctccgtctgccatggggttctcaagaggccagcaaggttgccatgcagccacatcttctgcaaaaagtgcatcctccggtggctagccaggtgccagcgggtacccaaggggctgggagggcaggagtgagactgggggccattgctgtggcccagaacagaggggaaagtcagccaaaagactcagccaccaaatctccctaaactaaaatgtgtgtaccctcactcagtagtgtctgcagaccccggccccaccctcagagctgagagcgccctgtaatatgccctaatgcctcatccagctaatgaagggaccacctgggtcaccgagtgagggcttgaccagggctcccttcccactcccaacactcacccctactcatgcctccttccagacaaaagacctgtccgtgctgtaggaaagaggtgaaaaggaaaaagrttgtccacatgaataaactccggaaaaccattggccgcctggaagtcaaggtagctcaaagtacccactcccctgaccctcaacccttctcacccttgtaggggtggggcagggctaggagagaaggcaggagaatcccatcttcagagagaaacaagtgcagccttgggacgaccagacatagctgagtttggatcgtggctctactg

SEQ ID NO: 96136 - DNA, 21000 bp, Homo sapiens
aagcctaagaggggcgaggcaggggtgggggttgggaagaggaatttagagctctcggcctgactgcaggttctgagtcctcctgagcgttgaaccgagtaagacaggccacatgcctgtctggtccactgcgggggtgaggtgctgcccccggaagtagggcaaatggaggtgcccttgctggggatcctgtctgctggccaggggggactaactcttcaaaaggggcttacaggcaggcgcgcacggtggctcgtgcctgtaatcccagcactttgggaggccgaggcagacggatcacctgaggtcatgagatcgagaccatcctggccaacatggtgaaaccccatctctactaaaaatacaaaaaattagctggacatggtggcacatgcctgtaatcccagctactcgggaggctgaggcaggagattcacttgaacctggaaggcggaggttgcagtgagccgagatcgcgccattgcactcaagcctgggcaacagagcgagactccctctcaaaaasaaacaaacaaacaaaaaacagaagggggcttacaggctccaaaagtggtgtggggtgtcacttggggctttccacactgtgtgaaggtgcctggggcctggctgcaggcctctgaacccccctccacctgtgcccacgtgcacactcacagaagatgtgtacactcaccagggtccacagacaggcacacagagtcccatctcctgtgcagcgcatgggactcctgggcctgtgtccagtccccttgctcctgacgaacatgctcctggtggccttccagtccatggagaccatcgacagggctggacagacctggccacagaggactctcttggggttgattgaacgctgctctgccctccccacagggctgggagacttccatgcccaaaggcctggcttagggctatgaaactggaggaggtggggctgggggagggcaaggagagccctgtttctgtgggaccctcctcttgtcctgttcagatccaccctggagatagaggcacaaatgggactaccagcctggaagaaggattgctacattgttttttgttttgtttttttggagacagtgtctagctctgtcacccaggctggagtgcaatggtgcaatcttggcttattgcaacctctgcctcccaggttcaagcgattctcctgcctcagcctcccaaggggctgggattacatgcacgagccactgtgcccagctaatttttgtatttttagtagagacggggtttcgccatgttggccaggttggtcttgaactctcgacctcagatgatcacccgcctcagcctcccaaagtactgggattacaggtgtgagccactgtgcccggcctgattgctacatttttataaattgaactggccaggctggtgggcaagaggcagtttgcagggcccagttattcatggaggttgggggagggaacaggaaagagtagcaaatcgccttctctctgtgctgattcctccaggaagacccaagggagaggattgagggtggctggaagcaggctggggccacccctctgcaggagaggattctggctcctctggcaaaccctgcaaccccaggcaggctcccagcaggcaggggactgaagacagtggggaagcgtccttcccgatgctgggaatctggtctgccttggcaaatcctgggaagccccacaacccttctctgtcacagtgtccctgggtcaccaggaacaagatccagggttcggcaagccaggcttgcttgccaccgtgaggccagtgatgcctttgtgctccagccttgtctgcagggaagacggaattatgagataggtcctcagtttccccagcgcgggagcagcctccgagcaccccttctgtggcccctgccgcacgttctctgggtccttgtcgtaaagaacattcaccaagcacttaggagctgggtacaaagggaggtgggggtgagtgtcaactttgtttaatacagtagggaagtgaggatcacaggcctggactcctgctaaggtcacccgctaggagggggcagagctggctggttttttttgagattgggtcttgctctgtggcccaagctggagtgcagtggtgcaattatagttcactgcagccttgacctcctgggctcaagagttcctcccacctcagcctcctgagtagctgggaccgcgggtgtgcaccaccatgcctggccaattaaaatagttttttttctttagagatgagatctccctatgttgcccaagcaggtgtcaaactcctgggctcaagtaatccttctacctcagcttcccaaagtgctggaattacaagcgtgagccaccacgcccggccacagtgctggccttgaatcagccttgaaggtccctacagcctttgctgttaccgttgccccatcctagcaaggggctcctgccccgcctcggtccccaccagggtgaactgggaacagcgggccctcggggagggtaggatgggggactggcctctctgaggggcccctccctgggagggaaccacatcctttatgagctcgggcaaatcaggcatctgaagtggaaaaaccccacacaaatcaaggacagctgggcccgccctctggcggcagccccctccgcttgctcccctcgcaggaatcctggcaggaggcrcggagcggggcagagccagtctcagggatgaagggtgtggttctcagggagggagttcctggagctcctcctggctgtgtgaaatctaccctagctgtcttcggcggagggcggggccgctaatcactttccagagtggggccgcggtcctgccctcgcttgtgagggcccaggctggggctgcccaccccggggaggggacagactgggaaagaggtggagaggggtgtcagggagggacacacacagacacacacacacagtcacttagttgctcaacaaacatgagctgtcatcctggtcaggcgtggagccacaaaagggatcaagactgaccccgtctctgcccttgtagagatcatgggtaggtggagacagggatcaaaatcacccacaaagaaatagttacagactgtgaagggggcacaaatgtagccaggacgctggttgaggatctgacgccgggcagggcattcctcctagcacggccttgctccccaggactccccacctcttcccctctccatcccctcctgccctggccctccttgtcacctctccaagggacaacgtttactgggcccagcagctggggcagcacagcccatctcccctcccagatcctctcctcccagccactacatcaggccgaccatccacatgttcgtcagctggagggtggacagaccatctgcctggctgtctggcttatacaggggtcaagatgagctcgggcagtgtggaccctcaaaacccctggggccttgggagatccggctaggcagaaggaacttgttgatgtctgtttcttggcggaggaggacattcagacagagagcaggaggcgagggaccctctcagggtgcagggacagcccacaccctttgtccctacagtctggttgctcaggtgtcctggggcagagggaaggaagtttgtgtgtgaggagcatggagaagaagttcctgaaattatcagatttaaccttcataaggcactcaacacagagttaccatatgattgagcaatttcactcctaggtatattccctagagacatgaaacgtatgtccactcaaaaccgtatacctgaatgttcatggcagcgttattcataagaaccccgcagtggaaacaacctagatgtccatcaacgaatgagggaatcaacaaaaggtggtccatccatacgatggagtattactcagtcaggaagaggaaggaggtactggcacatgccacagtgttgatgaacctggagaacatgctgagtaagagacccagacacaaaaggacgaacattgtatgattctcttttttttttttcattttagagatggtgtctcactctgtctcccaggctggagtggaatggtgcaatttcagcttcactgcaacctctgcctcccgggttcaagggtttcttgtgcctcagcctcccgagtagctgggactacaggcgtgcaccaccacacctggctaatttattattattattatttgagatggagttttgctgttgttgcccaggctggagtgcaatcgcgcgatctcggctcaccacaacctctgcctcccgggttcaagccattctccttcctcagcctcccaagtagctgagattacaggcatgcaccaccacacccagctaattttttgtatttttagtagagacagggtttcttcatgttggtcaggctggtctcgaactctcaacctcaggtgatctgcccacctcggcctcccaaagtgctgggattacaagtgtaagccatggcgcctggcccacacctggctaatttatgtatttttggtagagacagggtttcaccatgttggccaggctggtctcgaactcctgacctcaagtgatccacctgccttggcctcccaaaatgctgggattacaggcatgagccactgtgactggccatatttctttctttctttctttctgttttagagatgggctctcactctgtcgcccaggctggaatgcagtggtatgatcatggctcactgcagcctcgtactcctgggctcaagcgatcctcccacctcagcctcctgagtaagctaggactataggtgcataccatcacgcttggcaaattttgaaattttttgtagagactggtactccctatgttgcccaggctggttttgaattcctcgcctcaagtgaacctcctgcctcagacttccaaagtgctgggactactggtgtgcgccactgtgcctggctaaatttaaaatattttgtacagacggggttctcgctttgttgcccaggttggtcttgaactcctggcttcaagcaatgattctctttttgtgaaatgtccagaataggcaaacccatagagacagaaagtagattcgtggttgccaggggctgtgggaaggggagaagagggcgtcattgctaatggacacaggatttctttttggggtgatagaaatgttctaaaattgattgtgattgcacgactatgaatatactgaaaaccattgatttgcatgcgacaaatggctggattgagtggtgtgtgaattacatcacaataaagctgttactcttcagagactcatgcgagtcatgactgaggtcttcattttacaaaggagggtctggtggctcagagttggtgggagcctgaggaggaggcggggctggaccagcctcaggccagactctaagccccgcccctgttcccgcagggccttaagctccaccccatcctctactgcccgggctctctgctgctgagccttcacccacacggttccttggcctggaatgctgttctcctcgtcttcacctggccgtcacctccagaaagccttcccgacctctcctcccacgtatacccttccactgagcgacattaatggaatgtccactgcgtgccaggctctgttaggtgctggggatccactggtgaatgaacagccccagtgctgccatcctgggcgccccgaggtgtgtagccaccgtcagccgagtgcctgatggagggaggggtcagcttccaggagaaccctccgagccgactcctggtccctgcatctctctctccctgtccccagtccattccacatcctgctgttctgcgttctggtcaattcctcctggaaagtccttctgccctcagcggggactaaggataaagcatccagcagagagacggcagcggaaaggccaggagatggaaatgaccatgctgggctgggcagggggctggaggagccatcacggaaccagtgctggaatttcaagtcctgagtagggactgctgagaccgtggggatggctgagactgtggggacggctgagaccgtggggatggctgagaccgtggggactgctgaacctgtggggackmctgagaccgtgggaacagctgagaccgtggggactcagaccgtggggacggctgagaccgtggggactcctgagaccgtggggatggctgagaccgtgggggctcctgagaccgtggggactgctgagaccgtggggactcctgagaccgtggggatggctgagaccgtgggggctcctgagaccgtggggactgctgagaccgtggggacggctgagaccgtggggactcctgagaccctggggacggctgagaccatggggwcggctgagaccgtggggactcctgagaccctggggacagctgagaccatggggatgctgagaccgtggggactcctgagaccgtgrggactcctgagaccgtggggactgctgagactgtggggtggatgctgcagggtgggaccccmgcccccaccccgagccagcccgttgggaacaataccrtttcaagctagaccagaagaagaatttcctgtgacccagcataagccagcatgctctcctcgcattgtgcccgctgcctgcccacggggctcctgcagaggcttgcccagatgagcaggtgcagcccgcatgtctggagccggggctgggggactggtcagtggtcttcaccccgtcagccccgtgtggccccctctggccagggctgctgctgggtaggagctccggaatgtctgtgggtcgtggaggccttcggccccttgaggcagcccggctgctgggacttgtccagatgccatcagggctggaacggctcattaacgcagcagagcccaggacaggggccgcaagcccttggctgggaagaggctgggcctctgccgggagcctgtgccgtgcctgcctggcgccagccctgtggccaggaaggctggggcagaggtggagagaggaccygggtctcataccacctttgccttcggatggggcaagttgctcgccctctctgagcccggctcgcctcccctgccttccctgcaggctgctgctgggcgttggggatgtgaagttcccgcagtgtctagcggcccccgcaggtcccacccgagaggcccctgaatctcacgcccctcagaggcagcccctgggggaggtcctgggctccttctcttccccagcacaggggtccctgagtcctttgtactccagtggggtccactttgccagcttccgaaatgcatcactgatgtctctgggcagtgccaggtggaccaaggctgggcagatggggtgacttagtagacagagtatgtctcaggcctgaattcagttcaccactgggcccctgggagggaarcctattttctctgagcctgtcccctccattctaaaacagtaaccagaggtgacttgacctctcagcggccaggctgtgacccgatgtgtgactgtcagctgggagtgcaggacgcacgccattcccggccgcagactccccccacacgttctgggatccctctctgcacactagggtgctgtcccggcctctttctcccttggcaggccgagtgcccggatcgacgcttttcctgggtccccttggcctggcgatgaggctcccgctcctgcaggccaaggcttggcctatgcacctgccgcgcacgtcccggagtggggtggggggggaaggggatcggtcttcaaacagagggtcccgaggcccgcgcgccgccctgtccctgccctgcgtcccgaacggccaccgccgccgcatcctccccgcgcagaggtgaagatgccggagtcaagcgagccagggcctgggatctcggagcaggagcgtcctggtggtcccggcagctcgagtcgcgcccgggtggtggcggctgccggcgggtccagcccaggcagtggcctcggaggcggagtgggcgggggagggggaggggggagggcgtccagaccccgcycccggtcccgccccgcgcccgctcccaggctgcgggaccgccgggcgcagagcacaagccgggcacccacggactgagcggcgcgcgggccgagatgcgcgcccgcctgctgcccccgctcccgggcctggagcggcgcgaccccatggcaggtagcggcggcctgggcggcggggccgggggcggccagggcgcaggggccgggcaaggggccgctctgcgggcgtcccgcgcgccgatgctgctcgtggccctggtgctcggcgcctactgcctctgcgccctccccggccgctgcccgccggccgcccgcgcccccgcgccggcccccgcgccctccgagccgtccagctccgtccaccgcccgggagcacccggcctgcctttggccagcggtcccggccgccggcgcttcccgcaagcgctcatcgttggcgtgaagaagggcggcacgcgcgccctgctggagtttctgcggctgcaccccgacgtccgcgcgctgggctctgagccccacttcttcgacaggtgctacgagcgcggcctcgcctggtaccggtgagcaccctggcccgtccgccctgaccggcgccttcctggggagggtatcgtgcgccccagggagcagcggcacgatatcctgcctcccagggagcaggggtgcgctccgggcagtggggttgggaccgccctgtgggggccccaggcttgacctggggtcscggctccggaagaaggaatgatacttggctaggattccctgaaactttgaaaactgtggggaaagccccggttccgttctctctgctgagggacccagcaggactgggggaggcggtggcttcccagcccagaggtcgtttccagcccgtgggattacctggcagcgtcagaaatgcctctgccgcccgctcactctgggcactcaggtgtgacygaccgctggccaggtactgtagaaaggggcctccaggttccaggcagccacctagaaagcgtccttcctccccaagacccccgagtctgcgcacaggaacccttgttggtggtcctgggagtccggagaaagtctgggctttggaaaggaggagactgcctttaggtgagtgcccagggtgagtccagccccgtgcatggggctctgtggctgtcctgcctctacccaggatggacgtgggggtgcggcagccycagctgaagcagcccgcgctggtggctgctcatccccaagcttggacccagcgcctgcagagaggaccctgcccaaggccagttggggagtcagtgggggtggcaggacccagacgcttctccaggtgctccagtttctccgttcccgatcctctgatcctcttccttccctgacgcctacccctatttgttaactttgccttttgtactaaaactactcttgggtttggagggcaggcaggaaggggctccgtgagaatagggtggctcgcttctgagatctgaagggctggtgccagtgtggggtgctggggaagtcaggtggtggctaggggacatggagtccatcccggggctcacctggctgaattgggcatcctcagctcaggctccagggagagacctcactcccctgacggcaggcaggggtcagaatgcatccctaatccctgctgcagggaggagggtaggaggggctaccaagctagaagctggggaggaggggagtggcgagacgggggaggaggggagaggcgggagggggaaggggagaaagggctttgggttaaggatgcacagttaactggagtaaacacttcagagccacccctgagccccatgagctttgacagcaagagactgggggtgggatctgagctgggccgtgaggagccacaggggaagctagggttgggtttagccctaaagggttctggaagagcccaggctcctgaggccagtccaggcccgccctgggcatgtgtccagcgctgggggatcagtttggggaggatgagaggcagccaaggccaggcccaacttgggagtcagctccttagcctgggggtggggttccggggacactgacgtgcccagggttggaggggggtacaggagagtgactgctctggtagattcttgacgtcctcattttttagaagggggaggggtgggtgtggagaattccaaggggtcagtcccgtggcttctgcctcattaatctggtattgtcccttggaccaactgtgctgacccctcactgggcggtgcagagccagtagagctgggccygctgagcttccgcattgcaagtgtcctyrtgctctccgaggggccgtggccacgtggggctggtgtgctcctaggtgcctgtgcctccgtcctttcagcctgctaggagcctgcaatgagcctctgaaagttctcaccctgtctcagtttccccaactgcaaggcagcattgtctgctcttgagaccctggactgggcccccagtgcctgcaagctctgttctgggtgccgacgcggggaggcgagcagagtaaccagggcccccagttgagtctccgggccacggctcccactgggctgtgaccgacctagttccaggcggtgacccggccttcctgtggcctcsgcagttgggtcctggattgactttggccataggccctccttccctcctctccaccgtcagtcagctcatccaggctcttgaggggcctcccacttggggactgtagcccactagtgcccccgagctcagcacatgctcagccrttcccccactagtgaagcacctgtgtctgccaggtgtgggggtcacgcagactccccaaggtctcgatctgggaagggtgccctgtctgggggcaaatgggggctgtactttgaccatcatcttttagaaaagcaagaggagggtggggcacagtggctcacgcctgtaatcccagccctttgggaggctgaggtgggcagattacctgaggtcaggagtttgagaccagcctgactaacatggtgaaaccccatctctactaaaaatacaaaaattagccaggcgtggtgatgggtgcctrtattcccagctacttgggaggctgaggcaggagaatcgcttgaacccgggaggcagaggttgtagtgagctgagattgtgccactgcactccagcctgggcgacaagagtcagctggagtgcagctctgtctcaaaaacaaacaaaacaaaagaaaagcmagaggaggcaaggagcggggtgggtaggggaaccccttagttcctggtttgcaagagcagtgggtgcagggagtggggtctgagtatgtagtggggaagaacccggtctcctgtgggggatgcagtccccctgcactttctggctttggcatctgccaggcccttttggcatctgcgagtcccaggcctraggtgtggggcaggaggagggaggctgagatggaggagggagggtcgcccagggctggatgaaagccgcagggaaatgcacaccagatgaggtgggctccacaaggaggggggcagtcctcagagcaacttgtcagatgtttgtcacacgggggtycagtcctgctcctctccctcctcccccgtctctcccaccctcatccacacctgggctaggataggcttcggatgcctggggagggaaagtaattgatcccaaagatctcmgatctctgagctggtttgtgcaagagggggcctygaaagcccttgccgcctgtctgtgttcccactccccttccacggcagggggtccgggaaccccatccccctacggagctccctctgactctttggagagaaggcctggcagggtgaactttcctgttttggtgctggtccctccagcaggcaggaagaggaggatattcagagtcactggtgtgccatctgggaaaggaaaggggtgggctcctggtctcgcttggtgcctggggtcagtatgcccgagacgggagggaagggcctggggcttccttcctggccgaggggaaaagcaggcagtgacttctcatgaggcctggggtctttcccctcccagcactggcctggtttctctctatgggcatcgtcagcgaggtcccgtggtggggggtggtgmctccccttcttgacctctctcagggacgggggtgcccctgagctgccaggcctcagaccttggtaccgccaccacccaaggcctctgtgtttgtccctgggacgctgggtgcggctcccacgcgggttccagctgcaggaggtggggcggggagtgcaggggctctgggactgacaccacccttccaggtgggctggaaggaggcagccctccagggtgggaagagggagggctgagccccacgctcatccccagcacccctgcccctcccagtctccctgtggctgcttctgaagtggcagtgggtgggtggagggagtcccagctccctctgtcaccaagacggaggaggacttgtccggtatcgtctgtaggccakctctgcccagggcctggttctgcggggtgggaaggctcccgtgccgcccacccctactctgcaccgctcatggtgggtgttgtgggggaagcctggattctctcccgctgcctcacacatcctccctcccacctccagcgctctccaccgagcaccccastgcaggggtctgtgcagctgcctctggcccagcctgcgtttccctgggggtctgagcaggaaaaggggactcagaacctgcctcccaagggctcaagtctggggcggtcactcctggcaggtcagcctcctggcaggggccggtcctggggctgtcagcaggggtgggggaagccccctcagagggcaggagtcagggctgggcgtgactggcaaggcatcccctccctaacacagtccctgtgtttctatcgacctagttcccagccctccccagctctccctccgagctgtttgctcagctgacctrccacgccctgccctgcccaacctcaccctgcactacctggctggcaggtgctgcccggggcactgctgggggtgcctgggcctgcccgggctgggcacccagaatgggctctctgcccaggtgggacagtcctgggctgtggtcggctgattcccccgggaccttgggactgggtcagtgccctcctctcctgtgtcagaatgaggagaatctcagaaaggccccctccctggcctggcaccctggcaacctgcaagatctagggggccacagcggcccagggtcttgggaaggatcctccggccggcgccgccacgtctccgactttcctcacatgtgctgggctctgctggtaactttttggcctsctgagtccaggcccaggctgatgagaattcacagggctacagttaaagacggggagagaggccagccgcagtggctcacgtctgtaatcccagcactttgggaggctgaggcaggcggatcacctgaggtcaggagttcgagaccagcctggscaacatggcgaaaccccgtctctactaaaaatacaaaaattagctgggtgtggtggcgggcacctgtaatcccagctactccgggggctgaggcaggaaaatcgcttgaacccgggaggcagaggttgcagtgagccgagattgcaccactacactccagcctgggtgacagagcaagactccgtctcaaaaaataaataaagatgggaagagatgtaattacatcaggggagggagggagcagggaggactacttttggttgaggacacactgtcaataattggtgaagggctgatttaggggatgctgtcagccactgagtgaacgggtgacctcaagtgatctaggcgggcgggcctcggggtacttggtctgggatgagaaaggagctgggggcagcctagttccaggaragtgtgggtccggtgggagggagctggctctggaagcgaggacggcagggattgcacagggaagatatgtgggtggtgaggagcatttgggcctcccgaccagcgaccgtcaccctaatcctcagtgcagcagcaggcggggcaggccggcggaacaggccgggctgcaggcaggtgccgggctgggcaccctcacagtccatgttccaggctgcccagccgcgcacgctagcaggggtgggcccgagcagggaggaagacttgctcgccctggaggcctgggcttcccgggcataagggggccttggtcccgggcccctgggggccggtctagggctggggaggctcaggccccctctccttgcacccgtcccgcaggagtctgatgccccgaaccctggatgggcagatcaccatggagaagacccccagctacttcgtgacgcgagaggccccccgccgcatccacgccatgtccccggacacgaagctgatcgtggtggtgcggaaccccgtgacccgggccatctccgactayrcccagacgctctccaagaccccgggcctgcccagcttccgcgccctggccttccgccacggcctgggccccgtggacacagcctggagcgccgtccgcatcggcctgtacgcccagcacctggaccactggctgcgctacttccccctgtcccacttcctgttcgtcagcggggagcgtytggtcagcgacccggcyrgagaggtcggccgcgtgcaggacttcctgggcctgaaacgggtcgtcacggacaagcacttctacttcaacgccaccaagggcttcccctgcctcaagaaggcccagggcggcagcygtccscgctgcctgggcaagtccaagggccggccacacccacgcgtgccccaggccstggtccggcgcctgcaggagttctaccggcccttcaaccgcaggttctaccagatgacgggccaggacttcggctggggctgagcggcaccctggggatgctcagcaccttgattgacacccrctcgcctggccagagcgggctgcgtgcayatgctgggcagagaggaatatttaagaaataaagcttggacccagatttttccacaaacctcgaggttggagggtggaggcgctgtccccagggatgtggtaaccatatcagcgaactccactgggcactgactgtgtgcctcgtgtcgcactttttttttttttttttttttgagatcgagtctcgctctgtcgcccaggctggagtgcagtggcgtgatctcgactcactgcaagctccacctcccgggttcacgccattctcctgcctcagcctcccgagtagctgggactacaggcgcccaccaccacgcccagctaatttctttttgtatttttagtagagacggggtttcaccgtgttagccaggatggctacgatctcctgacctcgtgatctacccgcctcggcctcccaaagtgctgggattacaggcgtgagccaccgcacccggctatttttttttttttttttttttgagatggagtcttgctctgtcaccatgctggagtgcagtggtgtgatctcagctcattgcaacctccgcctcccaggttcaagcaattctcctgtctcagcctcccaagtagctgggattacaggcgtgtgccaccacacctgggtaattttgtgttttttttttttttttttttttttttagtacagacagggtttcaccatgttagccaggatggtctgtatctcctgacctggtgatccactcgccttggcctcccaaagtgctgggattacaggcgtgaaccaccacacccagccaattttaattttttcttaggacagagtcaccctctgtggcccaggctggagtgcagtggtgtgatctcagctcactgcagcctccacctcctgggttccagcgattttcctacctcagcctcccaggtagctgggattacaggcatgcgccaacatgcccagctaattttttttggtatttttagtagagatggggtttcaccatgttggccaggctggtctcgaactcctgacctcaagtgatccgcccatcttggcttcccaaagtgctgggattacaggcaggagccaccacacctggcccaaaactcattctttatacaccctcagaggtgggcagtgcgcctggtcaggtctagcctgtgagctcggagaggcgtagggcccgcccagcgacatgcagcttagccctagtgatgctgggggccatgctcaggctctcttctcagccctgggaggctgggcagggctgtcctcatgttcaggatgaggaaagtgaggctgcaggcctcgctgtggagtggtggggcaggattaaagtcgggtccgcacccaccaccttggctcatccggaatccaggtgcgcagtggacgcttccttctggagccttgtggaattgcctgagtgttggtgaggtcagcgagtgttgggtgtgtgcacagggagacggattaatagcctcttagccttccctgtagaggcccacccattcaggcaccacccactctctggccccacccactcccccaggcccctgctgccccagttccgtggtatttgttctgtgccctcccctggggatagggctgggatcagtggccatctgcagtccagctgcccgctcataactgaggccagactcaggcaggctggggtgccctgtccgcccctgtgtcctgggagtaggagggactcctcagtaatgaccctcacctgcttgtggccacgtgctgtctgccaggtgcccaccagctgccctgacgatgacytccggggctgcttgggcttagccccaggtctgtcgcaaggcctagctgtggtctccacagccccgctgagtcccacaggccctgatatggtctttctgcctctcagctacttggagccactccctgttttgggaatgcaggcagtgaggaaggatttgcaggaggggctgcgtctggacacccaccccgcctcctgctagtttctgggcccagtggacactctgctctgcagctgccctgaggggcaggcacttcccacaggcctctccatcccaggccaggacagaggcagggctggaggccggttctgagctcccctccgagcacccacccagagactgcagtggcaacatggtgggcagatgtgggcccagatgtggacaagtcacaggcacagcctccgtcctacctcgaagctctgatgtgggtggaggggaaagggcccccccgactgacagcagctttgggaagagggaacagactccacctcggatccctgccaggaggggatcactgggctgggctgctctgtccccaccccctgcacgggtgccctctgtgaagaccgggccaactgcctgccccaggcctgggggtgggaaggaatacaggacagcccctggcccctggtgacccagttcccagcccggtgcatgtggatttcttcttcctggacacacccttctcatgcctgggccgtttcaggggctgctcaccatcatcccaccacctcttttgttctacagtgagctctccgcatggcagctggagggccgtcgcggaataaaccagatcctattgttttaaaactctctgatccccaccttttccccttattgcttctaggatgaaaaccaaactccagatcacagctgttacagccctctacggcttgcccctccgtcctacatgcgctccttattccagcacgcccaccacactggcacctgccagctccttccacctgccgtggcctgtccaacctcatgggctttgcatgtgctattccctctgtctggaatgcctttccctgcagaaggtgctgacgggatggaggggcagctgctctcactgaggctctgctactttcctccctccgtttagagttccttttctgagtccaccaaatgaccccattgtttccgtcccgacacagagctgtgaggggtggggcactggtttggctggctttggggcctgaacccagggcctgggggggcagactctggaagcagcgaggggtgggctggcgtattctgcacccgctgagcaggaactccgcctaaccaccagcactcaatgcgggtgaggtgcccagctgggcctccgaacacacggagggcagatgtcggtggggacctacgggctgcgtgcrgggaggcgctccctgggagagtcatcagcctttaattaaagtccctaaattgcttccccagccgctccgtgggttttccatgttggaatgttccagatggggcgagaagcgctgattcaattaccctcttcctgttccgcccggtggaggggaaggggcctgggagcccatctccagccctcctaccccagccagaccaggatggcgtgggccacgggttggggtcctcacagccctgggagtccaggaaggggctcggagaagcctggggaggaggctgcttccgcctcgagggttctcacaaagcccctgccctcctggcctgctgggatgggtgggtgggaccaggtggccgtgctctccgccctaagccttgcacacacgggcatggaagccctgagcatgccctggtcccagcagcccagccccaaaggggacacagggaagggtcagcccctgcacccaccctctccacaggcctgaaaatatttatgaagccccgtcgtagaggaagagaggagactagagagggccagcagcttgcccgcctctcactgcaccagcgcttcctgcgaggcccaaccctggggagctctgagatcccccgtgtgcagggagtcggcacgtgggggcaacctggctccctccctcccctggggcaggggtcctcactgggttgatcgcctgactggggggtcctcagagctcagttggggctgctgacccctgccctctgtggggggacaggcctggggcccctggttctggacggcctctctgcctggggcatgcctctctgcccggggcatggggctggagggtcagggtgaggcgggctctggcttcctccctcccgggctcctcagtgtggccgtgcagggcagagccagggaagggaaggggaagccggcctccggggtgaagcctggattatggggtgccatgtgggcagcgcctgtgagtcccctttgtccaggaggaggggtgctttggggaaaggcgtgtttcccctgggccatgtggccagatctagaggcccctcacaagcctgagatggtctagatcccaggctccaggagggggccgggccacaggtgagaggggcttgagtgacttaaaatgaattgagtccccttggagctcctgtcctcactcctttcctggctccccaggcctgagccccttctcctatctgccagactgtcccgggcgccttgttcccctaaggagctgcggggttgtgatttccacatgggtccctctgcaggggctcggccatggcccaggagaggccagggaccccatgaaggcctgagatgctttctccagggcggccacagcagcccgctgctacactagtctctgtccctgcagaagctatgcagggaggggctgcaaatttgctgacctcaggaatgtggtgtttcatttctgcgagatgctccctttctagaaggttcctctcaaactggcaagggctgacttctgaggtctctgtcattgggaccaacacttatgctggagggtgaggtggaaggcaggggtgcaggagcagcctcgggttcctggatgaatccgttttattctgctttatccattgtagccctgggggcagctctgggcagccgggagccatcagtgcccctgggcagggccagcgccagcgcccctgcaggaagtccccactcctgaggcccagactcctttcgtgtcctcaggggctctcgggttctgagcttgcccttcctgtgtcctgcatgcctgccttattcccttggctggcacgtgagcccctcctccgtctgtgctcccgggtgcagcgctgaggctctaggagtcggggtggagcccgactgagggtctggagaaagaggaggaggctcagggacagtggctgagagagccccacagtggacttccttccaccaacaggcacccagggctagagtgtgtgcttctgagaactcacagggcaagctggggggaccacacggaggcccagcattggcgagacgagcgaaccgcccagctgccaagaaagcaaagcatgaactgcagagggacacggcacagggctggggcggggagctgaagctgggaagagccccggcaggagagcctggtgcagagatgacgtttacctgcaccctggagtgggaccagccatgacggtcaggcagactgccagtgcatcaaggtgccggggagacggacaaatggggtggggtgatggaggctggctaagaaacattctgggccgggcgcggtggctcacgcctgtcatctcagcaccttgggaggttgaggcgggcggatcacttgaggtcaggggttcgagaccagcctggccaacatggcgaaactccctctctactaaaaatacaaacattagccgggcatggtggcctgtgccggtaatcccagctacttgggagcctgaggcagaatcgcttgaacccaggaggcagaggttgcagtgagccgagatcgcaccactgcactttagcctgggcaacagagtcagactccatctcagaaaaaaaaaaagcaaagtggggacggaagggctggcccaggtggcataagggacccacttttccagcacgctggatagggcacatctgagccccactgcgctgctggggcacttagtatttctgaaggcaagagttttgtttcctgacttagaattctctgcagatactgcctcaagatggttctttctcaggactatccatctgacagtgaagatcctgggcccaaaatgagggaatgagggccagagacctaggttaaaaaccaggatctcaaaatgcaccctccagattttaatttatgtagccaaggtgtgtagtaggctatgccatataggatttttggtttttctttttctttttctttttctgaggagtttcg

SEQ ID NO: 96137 - DNA, 76161 bp, Homo sapiens
  misc_feature (1)...(76161): n = A,T,C or G
gactagagaccttaggccaggagatgaaggagttcagtagcaaagtcacacctgtccaattccctgagctttgctcactcagctaatgggatggcaaaggtggtggtgctttcatcttcaggcagaagcctctgcccatccccctcaagggctgcaggcccagttctcatgctgcccttgggtgggcatctgttaacagaggagaacgtctgggtggcggcagcagctttgctctgagtgcctacaaagctaatgcttggtgctagaaacatcatcattattaaacttcagaaaagcagcagccatgttcagtcaggctcatgctgcctcactgcttaagtgcctgcaggagccgcctgccaagctccccttcctacacctggcacactggggtctgcacaaggctttgtcaaccaaagacagcttcccccttttgattgcctgtagactttggagccaagaaacactctgtgtgactctacacacacttcaggtggtttgtgcttcaaagtcattgatgcaacttgaaaggaaacagtttaatggtggaaatgaactaccatttataacttctgtttttttattgagaaaatgattcacgaattccaaatcagattgccaggaagaaataggacgtgacggtactgggccctgtgattctcccagcccttgcagtccgctaggtgagaggaaaagctctttacttccgcccctggcagggacttctgggttatgggagaaaccagagatgggaatgaggaaaatatgaactacagcagaagcccctgggcagctgtgatggagcccctgacattactcttcttgcatctgtcctgccttctttccctctgcgaggcagtggggtgggattcagagtgcttagtctgctcactgggagaagaagagttcctgcgcatgcaagccctgctgtgtggctgtcgtttacatttgggaggtgtcctgtatgtctgtacgttggggactgcctgtatttggaagatttaaaaacctagcatcctgttctcaccctctaagctgcattgagaaatgactcgtctctgtatttgtattaagccttaacacttttcttaagtgcattcggtgccaacattttttagagctgtaccaaaacaaaaagcctgtactcacatcacaatgtcattttgataggagcgttttgttatttttacaaggcagaatggggtgtaacagttgaattaaacttagcaatcacgtgctcaragcttttgcctgtcagttgtgtgtgtcccttatagtcccttcccccacagctcttgctgaaagagtttgccttgttttgttttgttgttttgtatttagccagaggatgccaaaattagtcttctcaaagctttgagtagagtaagtgtgggaataagccagtttttttttttctgtttctgtaacttaaatgaacgggtttttttcccttgtatgccacttgtcctaacatgtccttaaggtgtttaacctgcctctgacctggcttgcaatgcataggtgaggagaagcagagagcttgtcatatgcaagtcctgtcaagaaaacaggtgggcatggtggctcaggtctgtagtctttgggtctttgggaggccagggtgggaggatcacttgagctcaggagtttgagaccagcctagacaacatactacgaccctgtctatacaaaaaaaaacttctctaaattagccggatgtggtggtgcatgcctgtagtcccagctactcgggaggctgagtgaggcaggaggatcacttgagaccaggaggttgtggctgtagtgagtgatgatcatgccactgcacttcagcctggaccacagagcaagaccctgtgtaaaaaaataaaataaaaaacagattggatgtctttcttctgatgtattagctattttcatatgttttctaacatacttaatatccttacaggcattatgtggattcagggtaaacttctcagactgtgagcctgagagttcctctctaggaggctccacaccattctgcctgctagatcggggccagatgagatgaaagtcaacgcttgagaaagaaaaccaacatgcattaactgaaacaccgtcttcacttgttcatccacagggtatagagcgagttccaagaaccaggctaggaaatgacacgctaagtttcctatttctagcagctgccaaggccaccagcaagcatgggaacctctgggagtcacagctcctccgtctccagaggcctggcagtggccaagtctagaaggacgcgggtgccacctggtacagggtgagggtgtgaataacagaccccgaagggttgccacctcgagccccgtgccttgtccaggaatacacaggctcttttgatgtcaggtaactttgccatatgatctttgtggtgtacctggtaggtcacaccctgtgagtgtgtagatgcctcctcccgtgctggctgcttaatttcttctgcactcataatcctgaccatcttgaagatcatcactgaaatactcctgtgtaatgtgtggctacaaagtgctatctaaagatgctctctcaaactcagctcatgaagatgagaggaacatcacagggaactgtgtggcttcttagcaggcatcagggcagatacttagaaattaaagttgaattttagaaacttacattttatattttaatgcccatcttacattttaaggtattttagtgagaaaaagttgcatcccaaatagtatttctgaatctgaaaggaagtcaactcctctgttactagaagttcgttcttctttttttttagacagagccattctgtcacccaggctggagtgcagtggcacaatctgctcactgcagcctcaacctcccaggctcaagtgatcctcccacctcagcctcccaagtagctgggactgcaggcatgcaccaccacgcctggctgatttttttttttttttggtagagtctgggtttcactatgttgcccgggctggtctcaagcttctggattcaagcgatcctccctccttggcctcccaaagtgctgggattactggtgtaagccactatgcccagctgtaagcagttctaattcagcaccaactttcaggagaagaccagttgtatgattccataagtgtcaagaattatccagcaccttgttaaaatttcattttaaccaacttaaagtaacaaatctgtgcaatcatggtagtgataattaatcaattgagttgatggccaagtctgttggcctctccctgtggtagcattgttcctactgtagtgtgctacctcaggaattcaaagggctcaagtttctcaaaggtataaagcagaagctttaaacatcccccaaaatgcaagcttgctctaacttgttcaccaggaagaattatagattacatctgtttgcccagccttatcattttcactttatggaacctcacaactctccgtaacctttatcgcacgttatttgctggagatggcgccatgctcctttcatggattagctgacattcctaataggctggatattttaggctgttttgcaggcttagaaacagagatttggggccaggcacggtggctcatgcctgtaatcccaacactgggaggctgaggtgggtggatcacctgaggtcaggagtttgagaccggcctgaccagtatggtgaaacccccatctctactaaaaattacaaaaattagccaggcgtggtagcacatgcctgtagtcccagctactcgggaggctgaggcaggagaatggcttgaacacggggggcggaagtaacagtgagctgagatggtgccactgcactccagcctgggccacagactgagactccatctcaggaaaaaaaaaaaaagaaaagaaaagaaatggagatttggcaaaattaagtcacttgggatcccaggaaattggaatctgaggctgaatgaaacctcttagtgggatggttgaacatgtatacggcaaattatgttgcaagtggaaaatgtgaaaaacacaatagagcctggcatggtggctcacacctgtcatctaagcactttgggaggccaagggggaggatcgcttgaggccaggagttcaagaccagccagagtaacagtgagacctctgtctctacaaaaatgtttttaaaattggccaagcagtggtggcttacacctgtagacccaactacttaggaggctgaggtgggatcacttgagcctaagagttcaagtgagccctgatcatgccagtgcctccagcctgagcaacagggtgagaccctgcctctaaaaactgaacaacaaaaaaaatcagtagggtgtcagctacgggagttactgtttcggtgcaatcagattaggatgagaggatctgaactgatgagcattgcagtaggtgaaagacggtaagtggccatttctattagcattaaatagtcactgatgtggtttcatcaggattcacaatacatgtgtggctcccaaattgagtttcaaagtcttgggttcatggtgtcccctgcccagcaaaataaagtgcaaatcttacggagcaacacattttaagttcaggcctcaagtacttccagagacaaaagtcctggggacactggctcagaatgggggaaaggggaccctgggccaagagtcaaccaggatgacatgcagaatcagacctgcaagggctgcagatactgtagttatgaggcacacccaacgcttaaagataaatatgtggttggaagtataagagcctattaaaactgctagaatataagaaatcaaataggacaaaaacagaatcattggcagggtgcagtggctcacgcctgtaatcccagcactttgggacgccgagggaggcgggtggatcacttgaggtcagcagttcaagaccagcctggccaacatggtgaaaccccgtctctactaaaaatacaaaaaaatgagccgggcgttaatagcgcgtgtctgtagtcccagctactcaggaggctgaggcaggagaatcgcttggacccaggaggcgaaggttgcagtgagccgagatcgcgccatcacactccagcctgggcgacaagagcgaaacaccgtctcaaaaaaaaaaaaatcggtgcaattaataacccagtggatgggttaaacagattgcacgtagctgaaaagtaaccgaaaatctggactggcgcggtggctcacgcctgtcatcccagcactctgggaggtcgaggcgggcggatcacttgagatcagaaatttgagaccagcctggccaacatggcgaaaccccgtctctactaaaaatacaaaattagctggtctgtaatcccagctactccggaggctgagg[132 bp omitted]tgcagtagggagaagtgggcgaaaggaaggaggccacgctgctgggtttcaggatgagatgggcgttgagggtgcattcacagaatcccgggaggagccagctgagcggggaaggcatcaggagaggggaggcactgagcggggcgcggtgctgtagggaacggaggctcatcagggcggccgggattgaggcgcaggcgctgagccttcacctaagtccgccgaagtgtgcagagcctggagacgggatcgaggtcaccggaagcccacggttgcggggacatgatcaagctacagcgcgctgggggaagcgaccactgccgccccgcggatcccaccggcctggccgggagctccctctgcccggctcacccgcgcttccggcccgaagcccggcttcctctgacgtcacggcccctgcgccccctggcggcgcggctgcggcgggacgcgcgggcaccgccccctccggctggagggcgggacttccggtgagtgagtgacgggcgcagcctcggcagcggcggcggcggagccctgaggcgacagcagctgcgggaggcgacgggctgcggcctgcggaacctgaggcagctggggagggccgggcgcgccggccggatagcgagccgcgctggcggcggcggtggccgcgatgatggagatccagatggacgagggcggcggcgtggtggtgtaccaggacgactactgctccggctcggtgatgtcggagcgggtgtcgggcctggcgggctccatctaccgcgagttcgagcgcctcatccactgctacgacgaggaggtggtcaaggagctcatgccgctggtggtgaacgtgctggagaacctagactcggtgctcagcgagaaccaggagcacgaggtggagctggagctgctgcgcgaggacaacgagcagctgctcacccagtacgagcgtgagaaggcgctgcgcaggcaggcggaggaggtgcgtgggccgcgggacccgcccgcatccccgtcccggacccccagccagccccgggccccggacccaacacccgtcccgaccccagaccccgctccggcaccccggaccgcgggacccctggacccccagaccccgccccgagacccgcctggaccccatatcccccgccccgggacttccccaccccctctgcccgccgtgagacacctccctagagcactcccccgcctgccccgggaccccaccccgactcccggggacccccttttccgcccaggcctgggccctggccccctcctccgtgcccccagccctgaatcttcagccccaaacccgatgtgcctggcgtcatccccggggagctcagcttcaaagccaggcctcactctcccctccccacccacctctgcatgacaattgcctttgctttcgtgcgtgtgttcagtcaaaaccgtttcccgaccccaagtgctacctctgttggctgccattctaaacccatctagaaaaggaatcttttggtgttcttagggggctgcagccgtctgtggatgatgttggagacctttcccttgtccctaatcccgtattttgaaggtctgtgacacgggtgaattgggtggttgatgtaaacacagaacaaggccgcaggcgggctgctcctctgtcagcagaaggaacactcgagtttctggaggtgatgtctttgcccccttggttccttgcttggcgagattgttagctgatgtagccagggctgagaaactccactctggcttctgaggagttaacagtctgagtttgaagcgtttaattctgtgctaggatgtctccataacctggaaatcgcttgtctgtgaagcagttacaagagccgggccctgtggggagcaccacttagcttcattcattcaccgtcagatactgagctcggcctgcctgtgtgtgggcccagarcctcgccctttgtcagaaacaggttcagggaggctggttcccatccctgctttgcctctgtgaccttggcctgtcgcctgcctggggttcgattttccatcaaaggagtgaattgcactaggcgatctccaagcccagaaattctctcattctaggagttaggtaatgctgtttgacttatgaatagaagtgtcttaggaaatgagcttcaattccttttcaattaattcggcttaacacattcttgactttaataggaaaataaaagattgtgtcagtattttggctttttctgaaaccaaggtgatttatggcctagtttggtttaaagcgtgtttataaaaatcataacagtatgttgtatcattcctcctttcctgtggtttctattgcgtttgggcttcgtgtctgtcgcgaggtggttatgcattgattggaatgccccggttccagcaaagctgagttaaagctctcaacctaagggaacgcaaaggttcatggattttggagctcagggtgactataggcattttactgggaaggaaacttgtcctgagaagtggaggggctgaaccaaggtcacccaccccagaagtgcccagccaggatgcagagtgaacccgacaccggcctgggcacttgcttccatgtcaggcagctgcaggcaccggagggctgctccccagaagcctggagtgccagggctgccctcgctcagctgtggagctgtggctgccccctgtgctgggcaccgccctccactgctctcccacactcagtggcctgacctggatttcaggtgggtttctttttttcaccttgtacctgtgtggtcagtatagtggacgagaaggaactgaaaggagaaaatcaagatggacaacgttaaggctaggaattataaccttgccgcttaaaaatgagctgtgcacaggataggcgctgcccagctctgtgcggttcacatgcaagctgctgtgagtgcatctgccctcccccagggctcctgctgaaccaagctggcgggtgtgcgtgtggtttgcaaagctatcacctttagtctgagacccaccattgccccagcgctttagagaagctgcaccgagagcttcgggagccgagccccgaagccagccaatgcttggccagcatggaggctatgattaaacgctaacggggcgcccttggaaagacctcagggctttacaactaaggaagagggctcgatgctgtcaacatttggcatgcctactcctctactgaatcaagcagaccttcatttccaactttgtagaccattgtgccctgtgggtcggcgtcttttctaggcagggacttgtgatcacatagacgtgtgtctgataagaggggagcgggacgtcacacgctgcaggcgtgtcttgttgcagaggagctcctgggtgagctgtcagcagaagctccgtccccagccactctgctcaagaaggcttagtcagagatgggtaacctgagccactgcagcttctgagcagacagaatccgcagggttttataaaaacctgagcagagcagacatccctgttcccatcttcttgccggtcattaccacagtgactcccaatgtgctctgataacaggcagctgagtgtatgagagtgacaggagctagagagggtggggtctcccgagagactgacccaagccgtggagtctgcagaccccagcctgagtgtcagcccggccctcaggagccacacaccctgggtccatcctcttcccctcgctgggctgcagtggccgcggactttgcaagtcagtttcatctcaagatccaagcaccatcactggctgttggttgcctggagaattgtgggcaggcagatgtagcagagtcagggcagaacccttgacgggttctcagggccgccgtggacggcaggcaccggacattgctagccgcctaccagacagtgcagtttctggttgtgcaggctctgatacaaagttttttaaaaccctcaagttatttcccagtggaaaagaagaaggtgggaaacagcagctgaacggggtgggggctggcaaggagcagatgctgcctccacacgcaccgtccggtgcagctccagaggagggccgggcagagccaccacgttkgccgggcttacccgggcagcaaagagcccttctcccrtagtgatcaactgcttagcttacaagaggaaaaataaggtgtgagagatgacatgtgartattagtggtcattatttgccttaaaatcttcttaaccctaaagaaactgctgctggtaacaccccccaggctcatggcaggcagctggagtgggtgttctctcaacaagcccagatggtgatgtttgctgatcattcggcatttgatgctatgtaaggaaaggatgcaagggaagacagttttatccaaaacttattttttccgagttaaataaaagttaccggccaggcgcagcgrctctcacatgtgtaatcccagcactttgggaggctgaggcaggcgagagatgaggtcacgctatgttgcccaggctggtctcaaactcctggactcaagcaatcctcccacctcagcctcccaacatttgacattgaactcctgacctcctcatctcaggtcaggagtttgagaccagcctggcgaacctggcgaaaccctgtctctactaaagaaaaaaaaaagaaaaaaaaattagccaggtgtggcggcaggcccctgtagtcccagcactcgggaggctgaggcaggagaatcacttgaacccaggaggcagatgttgtggtgaaccaagatcataccactgcactccagcctgggcaacaagagtgagactctgtctcaaaataaataaatagataaaaataaataaataaatgtcatccatttcatagactatttgggtaggattcagctggagaaaacaaacaccataatcccgctctacagagatgatcagtctgccatttttccttctttttttctcctctgcgccagacgatctgcaggaagtcttttccatcaatgaattaagatgctgaatcagaaatttttatttttgtttttcatatgacaaatagtaaatccaccactgcttggccagagtatgcgatttcttttcctgccatgttatgatattaagaacagttttttaaaaaatgttttttaaatgaagctatcaagatggggctgccagagctgcctttcctaggtgcctctgaaagctggcctggtgtagctgtaccactcaccaggagtacagcagtctccctaaaaagtggagcaaatacatgtaggaaccatggagaaggaggtacctgccagccagagagaacacgggacagaggccgaagtggcccggaggccgctgggcgcagcctgcccctctgccgctccgctgcgggagcccccgggccacgctggcagcagtcagacagggccgagagctgagagaagtcagttcttccaaaattaagatttctaaatgaaatatctgtttcatttttacgtttttaaaaaccattttgaaatatgtacagaaaggttgcagaattaacactcctcacccagcttcccaagtgcaggcgtcttcccacgctgctttctctggctgtgtaaggggctcaggggtccctgtgtccttgttgtgtcctgtgttctgcggtggcccctcgttctctgctcttattgaccttgaccattgcgacaacacagttcagtcactttgcagctgtgcctcagtctggctcatgggccctggggaccagatatggagcatgtcctcaggcctcagcaggaagacccatggcatgcagagcctcctagatccttaatctgtgccagatgggcatcaggtgaggggcacaagatttttggatgggcccctttcccaggttcccatttattaccagggctggaggatgagctgttagtgcatgaaaatcactacagaagcttgcccaggagctgcatggggtgccggctctccggacttgttttcctttgccctgttgaaagttggggtcccaacgctgggcgcagtggctcacgcccgtaatcccaacactttgaaaggccgaggcgggtggatcatgaggtaaggagttcgagaccagcctggccaatatggtgaaaccccgtctctactaaaaatacaaaaattagctgggcatggtgatgcacacctgtactcccagctacttggaaggctgaagcaggagaatcgcttgaacacaggaggtagagcttgcagtgagccgagattgcaacgctactgcactccagcctgggcaattgagggagactccgtctcaaaaaaaaaaaaaaagaaaaaaaaagaaaactgaggtcccgagctccccttgtcaccccaagtatctagccgccactaggtcctggtgttcttttggcctcaggagttctttttttttttttttttttttcttttttgagatggagtctcgctctgtcacccatgctggagtacagtggcgcaatctcggctcactgcaagctccacctcccaggtttatgccattcttctgcctcagcctcccgagtagctgagactacaggtgcccgccaacacgcccggctaattttttgtatttttagtagagatggggtttcaccgtgttagccaggatggtctcgatctgctgacctcgtgatccacccatctcggcctcccaaagtgctgggattacaggcatgagccatcgcgcccggccagcctcaggagttctttaatgtccccacttttcatctcctttgctgccttctgcttccagtcaccaccatcccagggtctcccggccactcccaccgccgccactttgccagcccagagaaccctcacaaagcatatctggtctctgagtgctagggtgaattccaggcagggggattagctgattgctctcctggggcagactggacatctcaggtggtgataacatgaggggatctgagtgacaaggtgggccaggacactgggtggacagagtgaggctgtcttccccaggtggccccccactgggcccacctctcaccagcctcatctgcctctggtcttctggctgccccccattctgcagacctgcagttcctgcctcctagaccacctgcccccacccctccctcggggtttatctggctagttcccgtctctgccggattcgctggtgtctgcctccgcagtgcacctgcagagaagcccccatcacccactctgccgcccctgcctggggagctgggcccccaccaggcctctctcccggcttccgcaagttaagctgctccctgccaacaaggggccggcaccctttggttcattcagcctgagcctgttgtttccttttctcggcacacccggagatgctggccatctgtgtgtgtggataaagggaagccggctttcctctgtctctgcacacatctcaccaaactgtgcagttccggaaggtcaaggactgtctctttggagcagcctttctgacagaacgttctgggatgatggaaatgttgtatttggtgctgtccacttcagtagctgctggccacatagggccgttgagcattttaggcatgactcatggaactgaggaactggatttttagttgtatttacttgtttcggagatgaggtctcgccacgttgcccaggctggtctcaaacttctggaccgaagcaatcctcccatctcagcctcccgaatagctgggactacaggctcgtgccaccatgcccggctgtgttttattttaattaatgtaaacatgtggccagggcttccatactggacagtgtggctgtgggcagtctagctgagctgcctggaagcaagggcagatggtgagttactcagcttcatgcaagaaaggaagatgcttaaagggtgggtttgtttcctgtttaatgaacattttccagaaagaggggagatcccgtagcagtgggtttcagatacaggagaccagacaggagaaaatattgtgagatgggaaagtggatgccagcaacaggaaacagcagagaggggctgaagttctcgaaaggccaagaagagcctggtgggaaaccgctcgcacctcaggactgcctgtgctcagggcacaggatcgactttttcgccttgggctgctttttgttttctttctgtgggtaacaattttattgcagtatcattgacatacactgaactgtacatacttaaagagtacaatttgatgagttttgaaatacgtataaacaccagaagccatccctgcagtccaagcagcgtagacgcccggaccccagagttccctgtgtcctatgtaatccccctccgacccctccttgccccacctgtccccaggtaaccactgacctgccttcagtcactgtaggttaatttgcatcttctagagctttgcataatggcctcctgcagtgcgtacgtggtttcctctgacatcttccactcggtacagtgattcggggactcacccaggctgtgtgtgtccttcccccatggccaagcagggtcccagcagtgccgtttgtccatccgcctgcctgcaggggagctgggcggcttgtttttacgtaaccttcacgcatgagcggtttgtaagcccgctcaccccgttggcagggtgttgggccaagcactgctctggggcaggctggcagtgaaacccagagactagaatccgcttatgagggggrtgcgtctttgcggagacccttagagcccacagcatcatyactctggtgcattttcttttgagccactgttacggcaagagatccagggcgtgccacgtgaaacgcgacagggcctttcctcaagacctctcctccgtgtggtgcgtttctcacacagggtctaggacatttcaattcttgttatcaacaaccasattcaaaacttgccttttgttaaagtttcggggggccccttcctccccaggcctctggggagtttggggctcctgttccctaacctttcctcagccagcctgcccatcacctttccttctccccaggaaatgaattcccagatatacgcacagtcccagtgggcccttgcacacgtgtgtctctatgtccctgcctcgggttagagcattcatgttttgagagcagggaccctttggctactgagaagagtgaactgaggcacggttagcaggcctctcgttcagtggaaccagagggagtcggaggttggggctgattaggaagtttcagaagccaatgtaaactcctragaatgcaccasagaataaaagtttacttgagaataatttttcccagggagatgyttcataggatgggacacttaacttgaggttttggttttatcttcatttttcttccgctggtaccaaccatataaatttatatatatatttcccaatacaaatgtatatgtactagtaagacagatgggaaatatatatatatctatttcccatctgtcttacccattcttgaaatcagttcgtattcaaccagttgggatttgttttacgtggacactgaacccagccrtccctttcacagaacgtgaggaagccttgcttttcaacctgrtttttggagtcccgagctrgtggccagctctctcagccccacacgtaatacctgaatggagaaatgtccttccctcgacccgtgtcccgtccagcaggcttcaggggcagctttgtaactccagagccaccccctgcacgtcctctctctgcattttagacctaggtggccaggcaattgtgggaaatggaaagagctctgactgccccctgccagcccagggtaaccacagccatgcgaggtccctgcccgtacctgggaactagccaygaagggcatctgccaggcacgtgcccggcacctgtctgcctgcttaagataaaagaccaaaaatgagcgtttttcctttggaaattcatactacaccctcattcccagggaaggaaataaattgatcggtattgcacaagaacgagatctttgattcgtgtcaagattcgtttctaaccaaccagccagagctgaattgtttctcgctggtgagcctggcctaacaaacgtatgagaggagaggtttggattttttttttttttgagatggagtctcactctgtcgcctaggctggagtgcaatggcgtgatctctactcactgcaagctctgcctcccgggttcaagcgattctgcctcagcctcctgagtacctgggatcacaggcgcccaccaccacacccagctgattttttgtatttttagtagagatggggtttcaccatgttcgctaggctggtcttgaactcctgacctcacgtgatctgcccacctcagcctcccaaagtgctgggatttcaggcgggagccactgcaccggccgaggtttggatttaatgtattactttactcagcaggaaagtgtccatgggttgtgaaagttaccaaaagcctgttgatcgccctgtgaaagaactttcctggccattgctctgacattctgagtccagaatactgtcatcttgattttatattggacattaaaagtcagtcactgcgttaactttgtttacatataaaaggaaggatgatatcattctatggaatactgaaaaaactggcttggattactagattttcgaagaccctatgctctcaggtcattwctttttttttttttttttgagacagagtctccctctgtcatgcagtggcgcgatctcggctcactgcaacctctgcctcctgagttcaagagattctcctgcctcagcctcctgagtagctgggattacaggtacgcaccaccacgcctggctaattttggtatttttagtagagatggggtttcacacgttggtcaggctggtctcaaactcctgacctcgtgatcctcccacctcggcctcccaaaatgctgggattacaggagtaagccactgtgcccagccaggttatttcaatatgtatcttgaaattcaccgaaaatgctgggcatggtggctcacggctctaatcccagcactttgggaggctgaggtgggtggatgacctgaggttaggagtttgagaccagcctggccaacatggcgaaaccccgtatctaccaaaaatacaaaaattagccaggtatgaccaggcgcagtggttcacgcctgtaatcccaacactttgggaggctgaggcaggcggatcacgaggtcaaggagatcgagaccatcctggctaacacagtgaagtcccatctttactaaaaataaaaaaaattagccgcgtgtggtggtgggcgcctgtgatcccatctactcaggatgctgaggcaggagaaacagttgaacctgggaggcagaggttgcagtaagctgagattgtgctactgcactccagcctgggcaacagagcgagatgccgtctcaaaaaaaaataamataaaaattagccaggtgtggtggtgggtgcctataatcctagctactcaggagactgggaggctgaggcaagagaatcacttgaacccaggaggcggaggttgcagtgagccaagatcgtgccactgcattccagcctgggtgacggagtaaaactccatctcaaaaaaaaaaaaaaaaaaagaaagaaagaaattcaccaaaaagcaaattctgaaaacataagttgaatttaattttcaagcagagccctttggtcgtgggagggatggggaagtacatcttaaaaacatgtctaaaaagggaatcctgtggcatattggtacctagatgtgagagttgtttcgtgtctcgactgaggaacgacacccatgttttccttcattttgtaatctcaagtcattgctccttgggatgctcaaaggtgacccataggtggcctctcatgtccagatgccacacagcatttcactagactcggttagataggtggtcgtgtcaaatacacgctgccctgcagcatggatcacgagcacgtgtacagaaacctttcactttgctattgtcacaccttcagtaggtctctgggaccaagatactaccgtgctgtattctgggtagttcttttatttttttataatctagtactatgcaggcccattcaaaaaaaatgctgatagttaaaactttatttttctcagctccgtttatattttgtaatcgtgctttatagacttaaattcatctctattccccaagtccccaccactgaaaattcttggttctctttttttttttgagatggagtctcgctctatcgcccaggctggagtgcagtggcacgatctcrgctcactgcaagctccgcctcccaggttcctgccattctcctgcctcagcctcctgagtagctgggactacaggcgcccgccaccacacccggctaatcttttttgtatttttagtagagatggggtttcaccttgttagccaggatggtctcgatctcctgacctcaaggttcgcccgcctcggactcccaaagtgctgggattacaggtgtgagccaccaagcccggctgaaaattcttggttctcttaaatcagaagtaaatgatttttttttttttgaagcagagtttcactcttgtcactcgggctggagtgcaatgtcatggcctcggctcactgcaacctctgcctcccgtgttcaagagattctcctgcctcagcctcctgagtagctgggattacaggcatgcatcaccatgcctggctaattttgtatttttagtagagacggggtttcaccaagttggccaggctgctctggaactcctgacctcaggtgatccccccacctcggcctcctaaagtgctgggattacaggcatgagtcaccgcgcccggctaatgatctttaaataaaaatattttctaggccgggtacggtggctctcgcctgtaataccagcactttgggaacccaaggcaggcagattccttgaggtcaggagttcaagagcagcctggccaacatggtgaaaccctgtctctactaagaatacaaaaattagccgggcatggtggtgggcacctgtaatcccagctagtcagaggccgaggcaggagaatcgcttgaacctgggagatggaggttgcagtgagccaagatcgcaccactgcacaccagcctgggcaacagaaccatctcaaaaaaaaaaaaaagaatgttccagcatccacccccagaagccccatcagaggactcttcacttcctcaagatgagttttctctcaccccaagtctagccctagcatcttctcactgaaaacgactcaacattaggggctgggcgaggtggctcacgcctgtagtgcctgtggttcaggaggctgtggcaggaggattgcttgagcccagtaggtaggtcaaggctgtagtgagccttggtcatgctgctgtactccagtctggataacagagcaagaccccgtctcaagcaatcttcctgcctcagcctcccaagtagctgggactatgggcatgcaacactgtgcccagctaattattttttgtagaggtaaggtcttgttatattgcccaggctgggctcgaactcttggcctcaagtgacactcctgcctcagcaacccaaagtgctgggattacagctgtgagccactgtgcccagcctgagacccaatctttaaaaagaaaaaaaaaaaatggccccttcctaagggacagagacctggtgctttcagacaggtgaaatgcataaccaaaaaataaatatgtatgtcggtgattcaaaatgattctcaaatcaatctagaaggagaaattaggaataaccaggaaaatgttgaaaaggaagatgtaagagggagagcagatattagatactagaaagtaccataacaccacaacaccagtttaaaaacctgtggtgctggctcagaaacagactaaaatgtagccaggcacagtggctcatgcctgtaatcccaatactctgggaggctgaggggggatcgcttgagcccaggagtttgagatcagcctgggtaacatagggagaccccatctctacaaaaaaaaaaaaaaaaaaaccacaaaaattagcccaatgtggtggcacgtgcctgtgggcccagctactcaggagactgagatgggaggatcgcttgagcccgcgaggtcaaggctgcagtgggtgacagagggagaccctgtccccaaaaaattgaaaaataaaagtaaaagaaaaaaagcctcaaaaacaaaccaaaaagtataaaagaaagaaatgttgagagttctacaaaagggcactgtcccactttttagggggaagtgtaagttgggacaccctctgaagagtcacttagcagtgcatgaccgcagcctcagagagcaggaagccagcaggtgaatatacaaagacgtgtgtgcacacagcttttgtttgtttgtttttcttttgagatggaatctcgctcttgttgcccaggctggagtgcaatggcgcaatcttggctcactgcaacctgggttcaagcaattctcctgcctcagcctcctgagtagctgggattacaggcgcacgccaccacgcccagctrattttttgtgtttttagtagagatggggtttcaccgtgttggccaggctggtcttgaactcctgacctcaggtgatccacccgccttggcctcccaaagtgctgggattacaggcatgagccaccgtgcccggccagctttttatagtagcaaacattttaaagcaacctgaaagtccataaagagataatggattgagcaaactgtgctctacacacacactcccagcagaacacacacctgccaaaaatggaagtggtcgagtacgcctgttggtgttgaaaggcatttcagtataaatcagtgaataaatcaggttacaaaacactgtgtacaagatgatcgtacatctgctctacacacacacatacaaatccagaagcacgtcacacaattttaacygaccctatagaccgagactcataatttaaaattttttctgtttttacctaacactgattttcctgcagaaacatacattgtttatataattattttcattttttatataacaggaaataaacttacctactttaaaaaatatccaggccaggccgggtgcagcggctcacgcctgtaatcccagcactttgggaggcagaagcaggcggatcacgaggtcaggggatcaagaccatcctggctaacacggtgaaaccccgtttctactaaaaatacaaagaattagctgggcgtggtggtgggtgcctgtaatcccagctacttgggaggctgaggcaggagaattgcttgcacccagggggcggaggttgcagtgagctgagtcatgtcattgcactccaacctaggcaacaagagcaaaactttgtctcaaaaaaaaaaaaaacaaaacaaggctgggcatgggggctcatgcctgtaatcccagcacttgggaaggccgaggcgggtggatcacctaaggtcaagagtttgagaccagcgtgaccaacatggaaaacaccatctctactaaaaatacattagctggatgtggtggcgcatgcctgtaatcccaactactcgggaggctgaggcaggagaatcacttgaacccgggaggcggaggttgcggtgagctgagatcgtgccattgcactctatctcaaaaaaaaaaaaaaaaaaatcctttgctcatgcctgtaatcccagcactttggaaggccaaggcaggaggattgcttgagcccaggagtttgagaccagcctgggcaatatagtgagatcctatctctacaaaacctttttttttagagagaggatctcactgtcatctgggagtgcagtggtgccagcctcagggctcactgcagccccgacctcctggggtcactgcagcaccgacctcctgggctcaggtgatcctcccaccacagcctcccagctcactggaactacaggcacatgccatcgtgtccagctaatttttttgtagagacggaatttcaccatgttgcatctaactcctggagtcaatcaatccactcgcctcggcctcccaaagtactgggattacaggcatgagccaccgctccgggcctataaaaactttgttttttcgttttgttttgttttgttttgtttttggagactgagtcttgctctgtcgcccaggctggagtgcagtggcgtgatctcagctccctgcaacctccgcctcccgggttcaagtgattctcctgcctcgccctcccgagtagctgggactacaggmgcccgccaccacgcccagctaattttttttatttttagtagaaacggggtttcaccatgttagccaggaaggtctccatctcctgacctcgtcatcccccccgcctcggcctcccagagtgctgggattacaggcgtgagccaccgcacccagacaactttttgttaaaaattcttatcagtcgattaatagcatgtgtgtgttcttcatatgctagttagccacagttaattcaaaatcacttatttttattttttgtaccgccgcacaaaaaagtcatgcattttctcagctgtggagtgtttgtttttcttccttttccttaagttgcatgtgatgcccataacacagactcttcctgctgcctcctgctccctgcctgcccctcccgcctctgtggttttctgccctctcagtaactgcacagaatgagtcacctcttgggcagagccccagtggtttcaacacaaagacctttttagaagctgctgctataggaagaagcgtcgaggagcctagtatccgggtgggagagtgggtagagttattatagggaacacagctgtggccactacccatggatcttccagatcccaaaagatgaaatccaccacc[450 bp omitted]cgtgagccaccgtgcctggccaattttttttgtttgtttgtttttgtttttgtttttgtttttgttttttgagatggagtcttgctctgtctcccaggctggagtacagtggtggggtgatctgggctcactgcaatctccacctcccaggttcaagcgattctccgcctcagcctcccaagtagctgagattataggtgtgtgccaccacacccggctaatttttgtattttttagtagaaacagagtttcaccatgttggtcaggctggtctcgaactcctgagctcacatgatccatctgcctcagcctcccaaagttctgggatgaggcaggagaatcgcttgaacccgggaggcagaggttgcagtgtattttttagtagaaacagggttttaccatgttggtcaggctggtctcaaacactcactcaggctggtggctcacagcgtgagccactgtgcccggcctctacaaaaacttctttaaaattagccaggcatggtgacacatgcctgtagtcccagctgctcaggaggtggaggcaggaggatcatttgagcccaggtgctcaaggctgcagtgagttgtgatcgcaccactgcagtccagcctcagagacagagcgagactctctcttaaaacaaaacaaaacaaaacaaaacaaaaggccagttgatatttatacttcttccagtgaaatttcttgataatattccccagttttctactctgtaaaaatgaggtgttaacagctccctctctgggctgctgtaggaactacacttatggcatcgatgcccggccacacctggggcctcactggcccccaggctcctcagaccttttatgagctgcttttattttgcaaaatgttttcttttcacttggtttgataataattttgtcctgaaacttaccacataaggttaakattccaaacctagaccaatccccctgcctttttatttaatgactaggagcaagactgtgttgctggttatcccagtaacgatggtgtcctgagctgagctgcaactgacatgcagaaaagtaggctcaaccttgttcttaggcgtggagttgaggggagtcagatgactccattgcaaacaggactggctgtgtgctcatggatcccagtgtaaaaatggaaacacagggctctatgttcaaaaattagcaacatttcaagatggcagcagccaagccaagcattgggccttctgagtgcagggccccgcattgctgcccgggtctcatgcagccacgaaggcagccgtaattggaaacaacaggctcccttcacagcaaatcctcccgggagaggagggtgcaatcatgcagtcctggagggctctcccgccctgccctcatggctcctcactgtgcctgaggagggtggtggccacagccacgtggcgggaagcccccattccggcctggccatgggccagcttgtggccctggggacatctttggcccctgggccctcaaagcctgyggcccttcaagtgaaaggcggctgctccacactcactcctgatgactgctctttccctcccttccatgcacagaaattcattgagtttgaagatgctctggaacaagagaagaaagagctgcaaatccaggtggagcactaygagttccagacgcgccagctggagctgaaggccaagaactatgccgatcagagtaagtggctggcgggagcctggaggcgcgcttgatgggygctgctctgggacggctctggttggggtgggcatggagcgccttccacacaaggggacgagaggaagcccagtgggagcctcagccatgtattccagctctttgtactgctgcctgtttctgtaatgggccccagattgtgtgtggaaataagtaaatcaggccactgtggccccatagcacttttgcttcagagtgaattctgacccccagatcacaagtctgtggtcctgaaggtccttcctgaatcttttgaacagagctcctgcagcccctggggtccccacctcttcacactgctgaggagtgatggctccttctcaggcaggagggtgggcccgctggtgtagccccattgaagtgacagcgcctaggtggggggcacagctgatcagggtgtctgtcccctgcaaggcgaagtagcagaaagggtttattattattattattattattattattattattataagaacagttggtttacttacctttaaaagtctttgcttaaactctactgtcaatgttttaggccaggcgtgatggcatgcgcctgtggtctcagctgggctgaggttgatactgccgtgtgggcacacagagacctcatctcttaaaaaaaaaaaaaaggccgggcatggtggctcacacctgtaatcccagcactttgggaggccaaggcgggtggatcacctgagcttaggagtttaaaaccagcctggccaacatggcgaaaccccgtctctataaaaatataaaaattacccgggcatggtggcgggcgcctgtagtcccagctactcgggcaactgaggcaggaagatcgcttgaacccaagaggcggaggttgcagtgagccaagatcgtgccactgcactctagcctgggcgacagagtgagactccatctcaaaaaaaaaagaaaaaatttaaaaaagaagaagtgatgatttcctgtgtaattttccttttctgtaattagatgttttgttttgtttggagacagagtttcgctgtttttgcccaggctggagtgcaatggtgcgatctcagctcactgcaacctctgcctcccgggttcaagtgattctcctgcctcagcttcccaagtagctgggactacaggtgcccgccaccacacccagctaattttttgtatttttagtagagatggggtttcactgtgttagccaggatggtctcgatcttctgacctcgtgatcctcccaaagtgctgggattacaggcgcgagccaccgcgcctggccccagatgttttaatgattgaaaccaatcggctgcggtttccctagctacctcaacagcaggttcctttatctctaaaaagttaagatcaaatttgggaaagaaactgttttgatatgttagacttactcctatccccagccaaggcctaaaggctgctgtgctgacaatgacctgctgacgagtctgggggccagagggtgaccayggtggcagcttccacacacatggaaacacactggcattcacaatgcaaagcaaacctaagacccgtgctgagcatacctaggtaatgcctttccataattacagagtctctcctggtccctcggctttcagtacatttcatgtgtgaaacattctcagctctcttcttagaaggagaaaaacataagctcaaattacaggcaaggctgggaacagtggctcacacccataacttccacactttgggaggctgagggggaaggatcccttgagctcaagagttcaagaccagcctgggcaacctggtgaaaccccatctctacaaaaaatacaaaaattagccaggcacggtggctcacagacttgtgggcccagctactcgggaggctgaggtagaggattgctcaaacccaggagggagaggctgcagtaagccttgatcacgccactgcaccccagcctgggtgacagagtgagaccctgtctcaaaaaaaatcaaattacaggctgaggctgttcactgggccagcaccaggagttggggccagatgagtgcagagagcaggccccgggctccctccaggtggtggctatactctgccccagcgggagctcacagagaggctgtggggctctgacctcacacagacaggtagcctctcccggggccacagccgttgccggggtcagcacaagcctgggatggctggttggctccctcctgcagcagccagttacatgtgtgcagcgtgcagtgtctataactcgtgtgctgtgtgcagtgtctgtgtgttgtgtgctgtgtgcagcgtctgtgtgtcatgtgctgtgtgcggcatctgtgtgagtcatgtgctgtgtgctgtgtatgagtgttgtgtgctgtgtgtggcgtctgagttgtgtgccgtgtggagcgtctgtgtgagtgtsatgtgctgtgtgcggcacctgagttgtgtgctgtgtggagggtctgtgagtgtcgtgtgctgtgtgcggcatctgagttgtgtgctgtgtgcggcgtctgagtgacgtgtgctatgtgcgggtctgtgtgactctgctgtgtgtagcgtctgtgagttgtgtgctgtgtgcagcgtctgtgtgagtgtcgtgtgctgtgtgcggcgtctgtgtgagtcgtgtgctgtgtgcagcgtctgtgagccgtgtgttatttaccatgtgtgttagtcacatttgctgcatgcagcgtctgtgagtcacatgtgtcacgtgtcatgtctgtaagtcttgtgttgtgtgcggtgtctgtacatcgtgtgtcaggtgcrgcgtctgtaagttatgcatgtttggtgctgtgtctaagtcgtgcgtgtgaggtgctgtgtctaagtcgtgtgtgtgaggtgctgtgtctaagtcgtgcgtgtgaggtgctgtgtctaagtcgtgcatgtgaggtgctgtatctgagtcacgcgtgtcaggtgtgatgtctgtaagcacctcaggctccttagggaagaccagactgactgctggcgctgacgcctatgctgctcctcggggtgagatccccgcgccagcagtgcagcttccctgggtgcctggtagagatgcgagagcccagcgtaggccgccgcggcctccaaggatgtgccaggccagttaccccccagatcacagagcaggatggccaaagtgagatgttgagccacataatctgtggagtcatttctaaacagacaccagaaagctggggaggatgggagggcaccacgccgaggacagggcacaagctggtggagcaccttaccagctgagtcccggccacgcactccctggggctgtctctcacctcgtggcgtcagccctccccattggtgggctgcaggacagagctgaggtttgaacacagctgtggaggcggccatcaggccgggggcacgcatgcaccattggcgggacatagagtggggtcccctggctgcggctgcccgtcggcctgtcatgctgcttctgtgtctcttgggcagatcacgtctggggccagagaggcccgtgttggtgtcacggggggcctcccgtttaagggagacatgactgtcagcccagaaggcacatagtcatgattggcctccccagccctcggcgtgtgtgagggacctcgctgcttgttctgccagacacgaccctttgacgtgtccaggaggttactcactttgaatcccgcctcctcccgcaagcttcttgtgcacctgttgcctgtgcctggcgtgcctgggttttgcctgcatctcagaagcttgtggctgactttagcacagagagcgcctgtgggtttccccacccccatatttaactcccaacagagctgagtgttttcccatggcacagggcacacacagcagccccccagacggccttcacagagctgagtgttctcccatggcacagcacacacagcagccccccagacggccttcacagagctgagtgttctcccatggtacagggcacagcagccccccagacggccttcacagagctgagtgttctcccctcgcacaacgcacgcagcagccccccagacggccttcacagagctgagtgttctcccatggcacagcgcacacagcagccccccagacggctttaacagagctgagtgttctcccatggcacagcacacacagcagccccccagacggccttcacagagctgagtgttctcccatggtacagggcacagcagcccccaagacggccttcacagagctgagtgttctcccatcgcacaacgcacacagcagtctcccagacggccttgcacttgccgggctgctgctggttgcctcaggacccagagtcccagccttgtcctggaaccccctccctctgtggttacaacccaagagttcagggccatggagaagcgtcttgtgcggctcagacagtgattgtgttttccagtttcccggttggaggagcgggagtcggagatgaagaaggagtacaatgccctgcaccagcggcacacagaggtgggcgcccagaggcaagcgcggagacgagggttggagacagggccgcggcctgacgcctgcgactcttgcggaccgtggttttcttccctggcatgtcccttttctagcatttgctgccaggcttgaaggctgtcagccccaggctggttagattcccctccaggacgctgtcttgatttctgcctgsacagggcagccggaaaagcctcacaggttagaggggacggagacaggccccccacggcagcgctaatgcaggcgtttccctcctcgcagatgatacagacctacgtggagcacattgagaggtccaagatgcagcaggtcggaggaaacagccagaccgagagcagcctgccggggcggaggtacgcggggcgcggcggggtggaggtacgcggggcgcggcggggcggaggtacgcaggacgcggcacatgccagggtcgtagtgcttgttatggcccgcgctctgggctcaggaygacagggaacactctggagacccaggaggagggagctggttggagcgtggctgagcagggatgtgggggggcggccctgggcgacggacatgtgtcgagcccgtgtgtcccttctgctcggtccacaattcagtcagggaggccccgggcagcttgcgcatatttaacccttactatccacagattctgtgtttgcaaatgtatctactcgctaaaatatatctgtgacctcagccgggcacagtgacttatgcctgtaatcctagaactttgggaggccaaggcaggaggattacttgagcccaggagttcgagctcagcttgggcaaccagcaagatcttgtctctacaaaaaaaaaaaaaaaaaaaaaaaaaaaaattgtttaaaaattagctaagcatgaggtggcacttctaggacatactgcctcaaataactacctgtagtcccagctactcaggaggctgagagaggaggatagcttgagcccaggggctggaggctgcagtgatctacagtcgcgcccctgcactcccacctgggcagcagagtgagccccgtctctaaaaaaataaaaaaagaaaatcatctgctcatgtgaggtcaaagaataaacaacaaaaaagaggctggtatggtggctcacgcctgtaatcccagcactttgggaggccgaggtgggtggatcacttgaggtcaggagctcgagactagcttggccaatgtggtgaaaccccatctctattaaaaatacaaaaattaagccgggctcagtggctcacgcctgtcattccagcactttgggaggccgaggtgggcagatcacgagatcaggagatcaagaccatcctggctaacatggtgaaaccccatctctacgaaacactcctgtaatcccagcactttgggagggcaaggagggcggatcatgaggtcaggagatcgagaccatcctggctaacatgttgaaaccccatctctactaaaaatataaaaaattagccgggtgtggtggcgggcgcctgtagttccagctattctggaggctgaggcaggagaatcacttgaacccgggaggcagaggttgcagtgagccaagatcgcaccactgcactccagcctgggcgacagagtgagactctgtcaaaaaaaaaaaaaaaaagggtaggcacagtggctcacacctgtaatcccggcactttggaaggctgaggccggcagatcacttgaggtcaggagtttgagaccagcctggccaacayggtgaaaccccgtctctactaaaaatacaaaaattagctgggtgtggtggcacatgcctgtagtcccagctactagagaggctgaggcaggagaattgcttgagcttgggaggcggagactgcagtgagctgagatcacgccacagcactccagcctgggcgacagagagtccatctcaaaaataaatacataaataaataataaatcataaaaataacaaaattagccagtgtgatggtgcatgcctgtggtcccagctactctggaggctgaggcaggagaatcacctgaaccccaggggcggaggtggcagcgagccaagattgcgcactgcactccagcctgggtggtagagtgagagcctgtctcaaaaaagaaagaaagggaatcagtactcagagcacttaacagtcctttgcagacaggcacacattagggagaaacgggagtccctgtgctggctccccacagaggtgggacaaggcgatgctctgccctcctcttcacctcctacccagatgcccggagaggagacaggagggccaggcagtgtcacgtgtcacgcatgaggccagttctagggttagttccaggggctccaagcccagctgtggcacctgttagtggggtggctagtcaccctatatttccaacttcctttaaaataaaggaaatagaactgaccaggatgcattgctttgaggatttcctgttagtagggtggccagccaccctatatttccaacctccttttcgtttttgtaaaataaaggaagtagaactgaccggaatgcatggctttgaggatttgagatcacaatcttatacgcgtacctgcatgtgtacatatttttcccctaggggcaatggtttagtgtttgagggactttctagaacatactgcctcaaatactgtgtggatgagcccaggagccttggccagccctgcactgagtcttattccttccacagggtgggggtaccggtgggtttccagggctcggtgctggttttcctcagagagtggggggagcctgcctagaatgggttcctctccgttttctgtgccctttgaatcaggagaaagccgggctgcaggccccagggagcagagcatcagagatcttgccagggtattgcagctccaggggaccggccatgggagaccagagacgcgacctgggctggggaggttggcgctctcgttctgagtctccagcagcggggaggaagggcctgaagtcagaagctgccgtcctacagagctggggcagctggaaggggggaagcctgtttctgcccccaagcctcccacagccagggctgcgatggcaaaagcctccctcacaccccatcaaggcctggccagctgcgaaagctgcatcgtgcctgcctgttctgggggttacacctgcaaacgagaagggtcagaacgtccagctctgggcttcatgggtcacgttctggatgatacagaagaagctgtcagactctgcttccgagtctctggacgtgagagcaaatgcacggtgtgcgcaaaggcccagctggccaggggcgtgccgtggagcctgcagcagcaggtcctcaggcagtctcgctgctctcagctggagcagggacctgcagttctcagggacttgccctgagaacgggcggcgccggccatctgcccacccagagcaccatgagaactacgccagggcgtgtggatgccagcttgccccgagaacaggtggtgccagccatccgcccacctggagcaccatgagaactacgccagggcgtgtggatgccagcttgccccgagaacgggtggtgccagccatccgcccacctggagcaccatgagaactacgccagggcgtgtggatgccagcttgccccaagaatgggcagcgccagccatccgcccacctggagcaccatgagaactacaccggggcgtgtggatgccagcttggcaagctgtgaaagccttgcaggtgtttccatcagatcccacagtgggagattctcattcgcagctcccgtctcgtggcatgcacgctgggacatcctcacctctggctctcggcagttggaagaggattccaagctaactggaattaaaatcgaacctggacccgggatctttgtgttgtttttcaggggagctgggggcagaggcaggcagtttggccatcccctgggagctgcagcattccagaaccttcagctgcctccttgccagcgcagcctcagacaggagtgcctctgaggctgtgtcggagggcgcctgggcaggaggagcccagcaacagtgtgcccagctcatcccagatcccagaggtgtgacgtgtgaactcaggacgccggccgagagcccaggttccgagttgcagtgatccccaccccaggcccacagacaacacccgagaggtcctgagagccccagggccatgtgagctcagccaagagcagaggctgccccagctccagagccgcctgatgctgccgtcgtcatgggccaggccaggcctacctggaagaggcgcgtggctgcggggcaaggagtacttcgtcctgcatgtttctctcatggtgtggggcagaaggtggcccaggaacctgctgtcgaggtgtccccgcgggacccagggacctgagctgagtctgggctgggcgccgcccccgtcccttggctcgtcctggcgccgagagttcagtgggaagccccatggtggtgcacctcgtccttgtcagggccccactgctggggtcccctctgcagctctgccacggctcctgaaggctatgtcagggctgctgcactcccctcagggaaccagacggtgccctctggaagaagcccctcgatcattttgtaagggatggatctggggtgctctcttgtcagcgctgccacaaccaggtccttctgcctgacctggccccagccattcacttcttctgggcacacaggacctttggcaccggccgtgggagcaacgccagcagcagtggctgtgtggtaggggccttccccagccacggaccccaggaagcctccatttgtgaaacaggacccctgcacctctgtgggagagggaggggtctcatccaggtttacaccaaagccttggttgccatgactggatccagccagaaggcaccctgcagtggggtctgcgcagctacattactctggcccctgggcctccttgccagatctccacagcacgtgagaagacgttggccctgcgggaagaaggcgctggggctggcggccctgtctccctgagcatgccgaggccctgacgggagcatgctccatgggggcgacagaggggcagggctatggctgggctacccctgcctccctccctggccggcggtggtactgagccgcatcaccagcgcacggaatcggtcacgcctgctgttgcggtggtggcattaagagccacctccgggctcgtgtgtcccctgcctccccaggccgagaccctggccaggaaggagagggtggggctcacgtgctgtctgccacctgcctgcaggcgtggatggcagccacagccttgtgcctctgaaggcatgagccagctaaaggaggaaggcacggcccccctcccctgtcccgagtgcttgcctttgtggggtcaggggtgctgggacaggccttggtgatgtatgctgttgctgggcagttgagctggaaggagcccgtccctgctggacacctgctctctcttctctggtgtggattctgtcctgccacaacctttggtcccttgggggacacatatttgagtcagtcccatctgctcagccaaaaccccttgattcaccatgagggcgccgtccatcctcagcgctgggcgccctccttcctgacccagatggacattttccttcacgcctggcgtggcttagtgagtgtgtgtctggaatgcagtcggtgtgagtgcaaacgccaggcagtgttctcgggccactgctgcagagtgtgtgtgtgtctgtgtggccacatgtgtgccgtcaccacgtgccatgtgtacacacgtgccaggcgctgtcttgagacattcgcgcagtgcacggcactggggacacgtggcactggctgaactgccacacagccccgttccagggcctcttgtcaaagccaagagggctcgtgtgtcgcatgtctgtccctcttgggtgcctgtgtgtggcttctgtctcatcggggtacggccgccctgcgtgtctcacatcaccacatcctggccgtccgtgtgagcgtccatgtgaccatcggtgtgagcatccgtgtgagcatgtgaccgtctgtgagtgtgcgacggtccatgtgactgtccgtgtttccgtgtgtgtccatgtgagtgagcgtccatgtgagcgtgtgagcgtccatgtgagcatccacgtgagcgttcgtgtggaacgtgtgaccgtccatgtgagcgtccgtgtgaccatccgtgtgagcatccgtgtgaccgtccgtgtgagcgtccgtgtgagagtgtgaccgtccatgtgagcgtccgtgtgaccatccgtgtgagcagccgtgtgaccgtccgtgtgagcgtccgtgtgagagtgtgaccgtccatgtgagagtccgtgtgaccatccgtgtgagcatccgtgtgaccatccgtgtgagcatccgtgtgactgtccatgtgagtgtgaccatccatgtgagcatccgtgtgaccgtccgtgtgagcgtctgtgtgcctgtccgtgtgagcatccgtgtgaccgtccatgtgagagtgtgaccgtccatgtgagcatccgtgtgaccgtccatgtgagagtgtgaccgtccatgtgagcatctgtgtgaccatccgtgtgaccgtccgtgtgagagcgtgaccgcccgtgtgagcatccatatgaccgtccatggagcatctgtgtgactgtccatgtgagcatccgtgtgaccatccgtgagcatccgtgtgaccgtctgtgtgagtgtgaccgcccatgtgagcatccgtgtgaccgtccatgtgagcatccgtgtgaccgtccatgtgagagtgtgaccgtccatgtgagcatccgtgtgagcgtgtgaccgtccgtgtgtgtgaccatccgtgtgagagtgtgaccgtccatgtgagcatccgtgtgaccgtccgtgtgtgtgaccatccatgtgagcatctgtgtgaccgtccgtgtgagcgtccgtgtgagcgtgtgaccgtccgtgtgagcatgtgtgaccatccgtgtgagcgtccgtgtaagcatccgtgtgagcgtgtgactgtccgtgtgagcgtgtgaccatccatgtgagcatccgtgtgaccgtgagcgtccgtgtgagcgtgtgaccgtgtgagcatccgtgtgagcgtgtgaccgtccgtgtgtgaccgtccgtgtgagcatccgtgtgagcgtgaccgtccgtgtgtgaccgtccgtgtaagcatccgtgtgagcgtgtgactgtccgtgtgagcgtgtgaccatccatgtgagcatccgtgtgaccgtgagcgtccgtgtgagcgtgtgaccgtccgtgtgtgaccgtccgtgtgagcatccgtgtgagcgtgtgactgtccgtgtgtgaccgtccgtgtgagcgtgtgaccatccatgtgagcatccgtgtgaccgtccgtgtgagcgtccgtgtgagcgtgtgaccgtccgtgtgagcgtgtgaccgtccgtgtgagcatccgtgtgaccgaccgtgtgagcgtccgtgtgagcgtgtgaccgtccgtgtgagcgtgtgaccatccatgtgagcatccgtgtgaccgtctgtgtgaccatccgtgtgtgaccgtccgtgtgagcgtgtgaccgtccgtgtgagcgtccgtgtgagcgtgtgaccgtccgtgtgtgaccgtccatgtgagcatccgtgagcgtgtgaccgtccgtgtgtgaccgtctgtgtgagtgaccatccatgtgagcatccgtgaccgtccatgtgagcgtgtgaccgtccgtgtgaccgtccgtgtgagcatccgtgtgagcgtgtgaccgtccgtgtgagagtgtgaccatccatgtgagcatccgtgtgaccgtccgtgtgagcgtccgtgtgagcgtgtgaccgtccgtgtgagtgtgaccatccatgtgagcatctgtgtgaccgtccgtgtgagcatgtgaccatccgtgaccgtccgtgtgagcatccgtgtgagcgtgtgaccgtccgtgtgagcgtgtgaccatccgtgagagtgtgaccatccatgtaagcatccgtgtgaccgtgtgagcgtccgtgtgagcgtgtgagcgtccgtgtgagtgtgaccatccatgtgagcatctgtgtgaccgtccgtgtgagcatccgtgtgagcgtgaccgtccgtgagtgtgtgaccgtccgtgtgagagtgtgaccatccatgtgagcatctgtgtgaccgtccgtgtgagcgtccgtgtgagtgtgtgagcgtccgtgtgagtgtgaccacccatgtgagcatctgtgtgaccgtccgtgtgagcgtccgtgtgagcgtgtgaccgtccgtgtgagtgtgtgaccattcgtgtgagagtgtgaccatccatgtgagcatctgtgtgaccgtccgtgagcatccgtgtgagcgtgtgaccgtccgtgtgtgtgaccatccatgtgagcatccgtgtgactgtccgtgtgagcgtccgtgtgagcgtgtgaccgtccgtgtgtgaccatccatgtgagcatctgtgtgaccgtccgtgtgagcatccgtgtgagcgtgaccatccgtgtgtgtgaccatccgtgtgagtgaccatccatgtgagcatccatgtgaccgtccgtgtgagcgtccgtgtgagcgtgactgtccgtgtgtgtgaccatccatgtgagcatctgtgtgaccgtccgtgtgagcatccgtgtgagcgtgtgaccgtccgtgtgtgtgaccatccatgtgagcatccgtgtgactgtccgtgtgagcgtccgtgtgagcgtgtgaccgtccgtgtgaccatccatgtgagcatctgtgtgaccgtccgtgtgagcatccgtgtgagcgtgtgaccgtccgtgtgagtgtgtgaccatccgtgtgagagtgtgaccatccatgtgagcatccatgtgaccgtccgtgtgagcgtgactgtccgtgtgtgtgaccatccatgtgagcatctgtgtgaccgtccgtgtgagcgtccgtgagcgtgtgaccgtccgtgtgtgtgaccatccgtgtgagagtgtgaccatccatttgagcatccgtgtgagcgtgtgaccgtccgtgtgagtgtgaccatccatgtgagcatctgtgtgaccgtccgtgtgagcatccgtgagcgtgtgaccgtccgtgtgtgtgaccatccgtgtgagtgtgaccatccatgtgagcatccgtgtgaccgtgtgagcgtccgtgtgagcgtgtgaccgtgtgagagagtgaccatccatgtgagcatgtgtgaccgtccgtgtgagcatccgtgtgagcgtgtgaccgtccgtgtgtgtgaccatccatgtgagcatctgtgtgactgtccgtgtgagcatccgtgtgagcgtgtgagcatccgtgtgagtgtgaccatccatgtgagcatctgtgtgaccgtccgtgtgagcatcggtgtgagcgtgtgagcgtccgtgtgagtgtgaccatccatgtgagcatgtgtgaccgtccgtgtagcatccatgtgagcgtgtgagcatccgtgtgagtgtgaccacccatgtgagcatctgtgaccgtccgtgtgagcgtccgtgtgagcgtgtgagcgtccgtgtgagtgtgaccacccatgtgagcatctgtgtgaccgtccgtgtgagcgtccgtgtgagcgtgtgagcgtccgtgtgagtgtgaccatccatgtgagcatctgtgtgaccatccgtgtagcatccatgtgtgtgagcgtccgtgtgagagtgtgaccacccatgtgagcatctgtgtgaccgtccgtgtgagcatgtgagcatccgtgtgtgtgaccatccatgtgagcatctgtgtgascgtccgtgtgagcgtccgtgtgagcgtgtgagcgtccgtgtgagtgtgaccatccatgtgagcatctgtgtgaccgtctgtgtgagcatccgtgtgagcgtgtgaccgtccgtgtgtgtgaccatccgtgtgagtgtgaccatccatgtgagcatccgtgtgaccgtccgtgtgagcgtccgtgtgagcgtgtgaccgtccgtgagagtgtgaccatccatgtgagcatctgtgtgaccgtccgtgtgagcatccatgtgagcctgtgaccgtccgtgtgagtgtgtgaccatccgtgtgagagtgtgaccatccatgtgagcatccgtgtgagcatccgtgtgaccgtccgtgtgagcatccgtgtgaccgtccatgtgagcatccctgtgaccgtccgtgtgagcctccgtgtgaccgtccgtgtgagcttccgtgtgaccgtccgtgtgagcatgtgtgaccgttcgtgtgagtgtgtgaccgtccgtgtgagcttccgtgtgaccatccgtgtgagcatctgtgtgaccgttcgtgtgtgtgtgaccgtccgtgtgtgaccgtccgtgtgagcttccgtgtgaccgtccgtgtgagcttccgtgtgaccgtccgtgtgagcatctgtgtgaccgttcgtgtgagtgaccgtccgtgtgagcttccgtgtgaccgtccgtgtgagcatctgtgtgaccgtgtgtgtgtgaccgtccgtgtgtgaccgtccatgtgagcgtgtcaccgtccgtgtgagcatccrtgtgaccatccgtgtgagcgtgtgagcatccgtgtgaccgtccgtgtgagcatccgtgtgaccgtgtgagcctgtgagcatccgtgtgaccgtccgtgtgagcatccctgtgaccgtccgtgtgagcttccgtgtgactgtccgtgtgagcatccgtgtgaccgtccgtgtgagcgtgtgaccgtccgtgtgagcatccgtgtgaccatccgtgtgagcgtgtgagcatccgtgtgaccgtccgtgtgagcatccgtgtgactgtccgtgtgagcgtggagcatccgtgtgaccgtccgtgtgagcatccctgtgaccgtccgtgtgagcgtgtgactgtccgtgtgagcttccgtgtgaccgtccgtgtgagcatctgtgtgaccgttcgtgtgagtgtgtgaccgtccgtgtgagcttccgtgtgaccgtccgtgtgagcatctgtgtgaccgttcgtgtgagtgtgtgaccgtccgtgtgagtgtccgcataaccgtrtgagcatccgtgtgatcatccgtaaccgtgtaggcgtccttgtgagcctccgtgtgagcgtgcaaccgtctgtgtgaccgtccgtgtaagcgtgtgaccgtccgtgtgagcgtgtgcacacgctgctgcccacaccctctaacacctgtctccttatcgtcacatgctgaccgtccgtgtgagcatctgtgtgaccgtccatatgagcgtgtgcgcacgctgtggcccacgccctctaacacctgtctccttgtctcgccctctgtgccatcaccacatgctgaccatccatgtggcgtgtgcgcattctgctgcccacgccttctaacgcctgtctccttgtcttgccctctgtgctgtcgctgccgtgtgctgccgtgtctgtcgctgccctgcagtcctcgtcagtcgtggaggaaaaggtaaaacccaagaggtgtgtccactgtggtgctgggggacgaccagcaggcacattagggcatcagttaccagcccagggcggctgcttggtctgctgtgaggtgtttcctgtggcagatgtgagaggtcggaagggccatctggccacattcacgagactgacactgagaaggtggcgaccactgggtcccctgcacagccatgcagctgggcagcgccgtccaggtcgcccacactctgccctcgctccacaagcactgccttggtcacagacgaaggcacggcgccgactcctgctaaggaggggtgtgcatcaggtggggctggtgctgactcggggggcgacgggccaaggaagggcccctctctgcatcagtcggacctggactcatagcccagctccctcactcaccagcctgtgtcagagccggtgacacacccatgacccccaagggcagcgtgacccccgagggtggcgtgacccctgggggtggtggtctctgaactagggagcatctgcatcccctgagggagctgcgaggacaaatcgggaggacggggtcagtcggcaaacgctcacgagcctgaggccagggcctgggggccggtggggaggagcaaaggaaagagtgaaggcagctcctgatcctgggtgatttctgtcggaggtggtggcctggctgagccgtggcccagcatggagctgtgtgggtgggagagccgtacatgcattcccttggcctcctgggagaccagaggcccctctgaccctgctgtcccctgtagcatctggtgacagccaggaccgcatcggcttcggtctagggactgagacgtgtctgatggcgtcagaactgggcctcagcagaggcgctccccgcaccagcgttgggagcgcagtggaagtggggccaggaggcccctggtgcagacagggcggttgaagcccagcctcccactggggtcatgctccctgggcctggtggctggctgccttcacggtggccagggaacctcatggctgttgtcacaacagcttgagtgccatggaccagcagccaagatggcacagcccagtcccagccggccctggttccctcgtgctacaggatacggtgttgtcctgaacataacagagcaggcggccagtccccagagctgtatgcaccccacaaagagaccccttcccagggtcattcttcatagctccccacccaggtagcggagctcctggtcagcggcggctgctgcgttcccctgtcgccgtctgcatcctccaggcatggccagagcaggttccttgaacccctgaggaagctcccttccctcctacagtctcagggctgagatgtaagcagctgaggctgtggtgcaagcagactcttaattcttgtcctgaatagccctgagcagtgtgggctccagcatctgaccacgtggcctgccccccagacctgaggaggtgaggagccagcctggcctctgggacctctgggctgttgactggaaacctcccgcggaggaggacgtaaagggagaccttgggctccatccctgctcttgcttatggcccacaggaggtcatccctagggactgagcccacagcagggggcactgagcactgtcctgacagctccagctcccaggcgctcccactgtcttgccaggctgtccgaggccaggctgtcccagggtccgtcttcaggttcggggctccctgacagcagagaggacacgtggggagggagaagacgcccctcaggctcaggctccggctgcagcagatgagacggggtcagtccttactctggatgtgtcgtgttcagatattttgcagtgaggcagcctcatgaacaggagtaatgaggatgggcaggaggggccaaggaacaaggcacaggggcaggaaggctggattccctctgctggcgccaggggaacaggcagggctggcagtaacaccacagggaggcagggctgggcacacataagacaatggtcctaaaaggcattgctcatggtggccgtgcagcgctgaccgtgatgccaagtcccgtggctggctctgctgtggggtgtctaaagcacacccggcttgtgtctgtttaaaattgaacttaggccgggcgcggtggctcacgcctgtaatcccagcactgtgggaggccgaggcaggcggatcatcaggtcaggagatcgagaccatcctggctaacacggtgaaaccccgtctctactaaaaatacaaaaaaaaattagccaggcgtgggaggctgaggcaggagaatggcgtgaacctgggaggtggaacttgcagtgagccaagttcgtgccactgcactccagcctgggtgacagagcgagactccgcctcaaaaaaaataaaataaaataaaataaaataaaattgaacttaataaaaatgagaaactgcagcatcatgggaggggaagcgccacgtaggatcataactgagtagctgctcgagctgggctgctggctggcatggagcggccccatcactcgaggtctgcttgccctgggagggcttgggaaatcttcacggccaccctctaaccatcgcttcctctcctctcgccccccatttcagcaggaaggagcgccccacctccctgaacgtgttccccctggctgacggcasggtacgtgcacagatcgggggcaagctcgtgcctgcgggggaccactggcacctgagtgacctcggccagctgcagtccagctccagctaccaggttttgtagccgtgccgtggagtgagaggctcctccctgttgctggtgttccccgttcactggggcgggagcctcgtctgcaggcagcccttcacggctctctgggccactcgccctctcccttcgtgtgtggcaggatggagaaacccagccagggtgtcaggggctcaggctgcccagcaggccctgtgtggctgtggctgttccacgcggcctcgtgtcggcacctgctagtccaggctagacctccctgcccttggatagaccgctctgtagccaggggtgtacagtgcctgtcagggttgagcttagtgatcctctctcaaaccacacccccacataaagcctcatgctcacccgggctccagccagacacatcctgcccctgagagccacgcctctactctcggaggaacgtcagtgtctagagtgtggggtttgccctccgttggcagaaaggtgaggagaaagctcctcttctctgggcccctccctgcctgtccctggtaacgcctcctgggtcctgagtttgagaaagcagagcctcgccccagcaggtactcacagccagagtgcgggggccccagcaggttctcacagccagccggtgagtgcacctcagagcacaggggcccagagccaggccactccttcagggccccaggtcgcttgctgccagttttggcctgtgagctcactggcctcagtgccaggtaaggacagccaccttcctgggaagaagaggtgaccccgggtctggtggatttcccacaggggccgtcagaggatgtccacagaggcagagcccttggggcctgtgggctgggttgggctggtggatgtggggcctgggacttctccagaagcttacttcctgctgcatgctttgccgactgtccttccacctctaagtgtccatcgtgcctgtgggggctgctgcaggctcctgctccgtcagcccacctgctgctgcgctgctctgggagcgagctccctcatggcatctggaacgctctcctgtcctccctgtgctcagggctggagagagggtggcggggctgcgggctccccgggccttctgggcccagccctgccacctgggcccacctcctctcactgtctctggctcacgcttcccgggcctggagctgggacctgcccataggcatctgaagacacgtcagcctcagccggggggagcccttrcttgacgctctctggcctccgggctgcctctcgcgcccgctctgggcccgctcttcttctcatgatgtctttcctttcacctcctgcgttgtctgacatcgtcgctctcttcataaattgtagcgttttatgttttcgttcataggagtgttttatttgatttttctttattttaaattattacatttaagttctttttattttatgctctaggttttgaagtttttctaatttcttaatttttttgttgttttttgttttgttttgtttttgtttttatgtactgtattttcagtgttttaaccaaacagttgtggctactcatggtgaggaatgaccgctaagagtttgggttctttcagtgcatttggaggtcactgctacacgttgatgtttaggaggttgagaggtttgcctttaggtaagttgtggccagggggagtgtcccatgggtaagtggtggccctgtagggtgacggagagctaggggaggcgcaatcagactgcagaattccccgcagccaccatgagggtcaggagcaggccggggacccagcgtggaggaaggtggcccagaagcgtttgtctgatgtgcacagctacaccctgcctggccacatggggttccctgttttctctctgccgggtggtggcagagtcggtgagacaccaggtgcctgtgacacattgggtagacaggttctttgagaacgtcagcacagacttcttgcatgagcggtactcgcttcctccagcgtggggagtgacatgaagagcaagggttttcctttcaaactgggcatagctgcagagccacaggccgtctcagacatttctacaaagccactccgggaggcgggctgcgcccgtgtgagggctctccctcggcactgctcatcttttggggctggacatgcrtggcctgggccgctgggacgcggtgggtgtggagcagcatccctggcttccacccacgaaagccaggagcacccccttcatttgtgaccacaaaaatgtctctggactttgcaagcatcccctcggggcagtcagcccaactgagaatagctactatagaggaaggtgtgtcattttgagattccttctagagaaacttaggagcctggtagatgaagcagaaatgtgtcctctgagtgagtggccgtgtccggtactgagaggccccgtgccctgagtctggcggtgaccagagaggctgggcagaggcagaggtcagcactggccatgacttctggaagtcccgtctgccctggtcacttaaaggccagtataagtcagctgtggagagggctggataccccctcgacagctcctccctgggtgagatccttagcattagagtcccccacggtgcgccctctgagagaccacgggaacccacccagcggctgcctgggacaggcacaggagccacctgggtgcctctgaggccttgcactttcccacacctcaaggagggccgggggccacgggcaagctctgccatagcgggtgatcaggtcagctaagacgagaacgtttggggctctttttctccagctggttcagtatctttgttaggaaagaccattggaaagaatgtttgtttcgcattccgcattagtcacatagaatgcgctcctccctagcgagcttcctgaggtagacggctggttgcggtttctcgtaatccgggctgcccccaccctccagaatgtcttggtggcgtccctttctgtgagcagggattgtggtttctttgcgcttgctcatgttcaggggtgagctctggtccagtcaagccacagggtcagcaccttctggtcactccctggccctgacctgagcccggggaggaacgtggggcaggcgcgggtgggcccagcctcgagctcttcagcacagtgatggtgacggggcagcggtggcggcacagccagcccttcttgggtccccagtcagagccctctgccctacctgggctggacttgtttctgaacagccacaagctacagggggctgccgctgtgtccctggcgaggcactggcccattacaagcaatcgtctggggagggcaccagtggaaagcccygttccaagccatttcaggagggtggccctgcttccgaggagccggagtcagtggccggataagcagagccactcgggagtggtgaggcccggaagggttagcccggtgggcggcagaggagctctggcccgcagggtgtcgggcgaggcaaagtgcaaagcattggtgcgcggggcctcaggcagccacggcggagccgcaggccagggacctgcagtgactcgctctccctcctccctgtgtttggccttagtgtccacaggatgaaatgtcygagtcaggccagtcctcggcggccgccacacccagcaccacaggcaccaagtccaacacgcccacatcctccgtgccctcggccgccgtcacacccctcaacgagagcctgcagcccctgggggactatggcgtgggctccaagaacagcaagcgtgcccgggagaagcgcgacagccgcaacatggaagtacaggtcacccaggagatgcgcaacgtcagtataggtgggtgcccacctccgggactctgggctccctcgggcaggaggcagggcttggtttgggtagatgtgaaactaatgcaccaggcgggcagtgcaggcagcagagacgtgttcctcacagcccggaggctggggtccaagatcaaggcgctggcagggtaggttcctcctgcggccactccttggcttgtagacaccaccttctccctgtgtcctcaacaggcatcccctgggtgtgtctgtgtcctcatctccagctcctacaaggacatagccccattggattagagccaccacgtgacctcattttaccataatcacctcttgaaaggcccagcctccaaatacagtcatgctagggggtatctattaacatatggatttggggagacacaactaaggcagtagcctgcgtcaccccacggcacacagccccactaaccagtaacctgcatcgccccacggcacacagccccactaaccagtaacctgcatcgccccacggcacacagccccactaaccagtaacctgcatcgccccacggcacacagtcccactaaccagtagcctacgtcaccccatggcacacagccccactaaccagtaacctgcgttgccccacggcacacaggccagtgagggaaagagaagaggggaatgagggccgagaggaggtccagccactggcttgcttggacgtgggatctctggggactgggcttactgctgacactcccatgcagagaggctgctgcaacccaccccsctccaggccccgcctcagacgtctactgtgctggggttcgacctctgcccagtcagcctgggaagagctgttttctgatcatccccacctagcaggtggtccagctccagcccaccagactcaggttccgagggcagccgtgagcagggcagaggctgccagaccctctcctgaccccaggtgcccctgtgctctcccctaggcatgggcagcagtgacgagtggtctgatgttcaagacattattgactccacgccagagctggacatgtgtccagagacccgcctggaccgcacaggaagcaggtactggctcagcccaggccctggggtcctgggggctcagtatttatccaagtcggtgtctttggtgaagtcttcctctgccaccactgggagaaccatcaaggctgtggcctaccgcctccatccacgaccggcctgcagggcagtgtgggcattgaatggcyacggtgggaggtgttggaagagtctgcagacgcagccactccgggctgcccactgactctgctctctctcccgacctgtggatcccaacagcccaacccagggcatcgtgaacaaagctttcggcatcaacaccgactccstgtaccatgagctgtcgacggcagggtctgaggtcatcggggatgtggacgaaggggccgacctcctaggtaagcgcaagccttcccccgcaccgctgtgcctgcacaatgctggggctttctgctrttggttttgtttgtaatgaaaggaaagtcctctgtcagctgtgagctaggaacctttttttttccagctttgttgagttgcgtttcacatggaattgtccctccatctccacaggggattggtttctggactgccccaaggatgccaaaatctgaggcttctcaagtccctgctctgaagtggtgtagtgtttgcaccctcccgtgtactctaaatcacctctaggttatgttgtagatgctgtgtaagtagttgctgttatgctgtgtcgtttagggaataatgacaggaaaaaagtgtacacgtcagtacagacacggccaccacaggcctgtacattttctgtgaggctggttgaatccacacatgcagaactcgtgggtattgagggtcgactgtatcataaaattcacccgcttcgagtgcacggtgcggtgggttacagcgtactcacaggtggggcagccacccccatgatctcagtttagaatgttccgccatccctaaaagaaatccatgcctgttagcctcgccccatcttctgcacacaccctcagggctgccaactctccaggaggttgggagggtgcccgcttctctgctctgtgcccattagcctcgccgcacrccctaggaccattgactttggaggaggttgggagggtgcccacttgcccactcctccgcagacagccctggcttcacctcagcgccacaggtctacaccggacccctgtgcctaggtctgtggcggctgcaaacatcaggacctgcttcctgtcagcacgtggagtctcctgtgctcatggcatctgctggcagctgagcactggccatgtggctctgagccccaggctttcaggcatgacaggcgggcagtaggacagcscagtctgtccccttgcacgcgtcagggtccgagcctttcgccatggccttgcttcccccagcccgcagggtgagaagctcctggatcccaggctgcctcctggtgtactcctgagctgattgtcttatctggggcagggggacctccagggagcagagtaatgtggggtgctgagcaccagcagggcctcaccctgacagggaggcctgtctcatcctggcttgagtcagaaagtgccccagtagaggccatgtatgagtaacataatattcaccatgttaaccgagttgaagtgttcagttcagtagtgttggacacactgtacttggtggtgaaagatggaatgctccccgagatcaggacggcggtgagggcgcactttggtgctgtgaattttctgtggaacttttctcatgtgttgcaaaaatatatataaaaaatccaaaggagattaatcttcagaaaaatcctgctaaataggggtaatctcttttaatattttgctatccttccactctacataattcagataatgtttatttatttatttatttatttatttcttagacaaagtcccgctctgtcgccaggctggaatgcagtggcgccatcttggctcactgcaacctccgcctcccaggttcaagcaattctcctgtctccgcctcccaagtagctggaattagaggcacgcgccaccacgcccggctaatttttgtatttttagtgcagacggggtttcacaatatttgccaggctggtcttgaactcctgacctccggtgatccacccgcctcaggctcccaaagtactgggattacaagtgtgagccaccatgcccggccgataatgtatattttttagctattttttttattttttgaaaaaattatatatgcttataataatatttaaataatatcagcaaatgccaagaagagagtaaaaaccagagggaacctccccaccatgctataatgattttttttttttttgagacggagtcccactttgtgggccaggctggagtgcagtggtgcgatctcggctcactgcaacctctgccttcccgggttgaagcaattctcctgcctcagcctcgtgagtagctgtgattacaggcatgcaccaccatgcccaggtaatttttgtatttttagtagagatggggtttcacagtgttggtcaggctggttttgatctcctgaccttgtgatccacccgcctcggcctcccagagtgctgggattacaggcgtgagccaccactcctggccgattgttttaatgtcttggtgacacctaccagacaccatggcccatggcccacagaggtatgacacatgtgtacgcagaacacacagtgtcaggtcgcagctgcccttctcattgtgggcggtgtcatttccgtgggtggcagcactgacgggcacggccaccgtcggtccttactgcagcatcaagccgccctcctgccagtgtccccatttatagatgaagaaactgaggccgggcacagtggctcatgcccgtaatcccagcactttgggaggccgaggcgggtggattgcttgaagtcaggagtttgagaccagcctggccaacatggtgaaacccatctctactaaaaatacaaaaagaaattagctgggcctggtggcgggcacctgtaatcccagctactcgggagactgaggcagaagaattgtttgaacccaggaagcggagattgcagtgagctgagatcgcaccattgcactccagcctgggtgacagggagagggactctgtctcaaaaaaaaaactgaggtcagggagggtgagatgacggtgagagctcggacttgaacgcaggtcccacccagaacagcagccctaactctgagcaaggtctgtgctgttcagtagctctattgagatgtgatttccacactgtgtaattcattcacttacggtgtacagtccagtgggtcttagcatgctcggtgttgacagtcacatcgtcttcacccccaaaaggaaaccccgtgcccatgagcagtcgctttgtctgcccctcgtccccagccccaggcaaccacaaatccatgctctgtctctgtagatttgcctgttccagacgtttcacagcaatgggccttttctgcctggcttctttaacgttgcatcacatcttcaaggtccatcccagctgcagcgtgtcagtgcctcctggcttttcactgctgagtagtgcccgttgcatggacagaccacgttgtgctcacctgtttgccctaatgggcccctgcttggtgctttccacctttgggaggctgtgaatcgtgctccagccacactctgacccccgcccggctccaagagatgaccaggattggcagcttcctcaccaaccagggactctgtggcctgcgcatccgcccatcctgttggctgtggtaccctgtgctcaacccgtggcctttgtgctgcctcgccctgctgcacagccaccccctgcagcacccacctagagggcactggccaggagtctgctttcccacgagaccgtgaggcagtccttttctcataccacgatggaggccgagtcactgtgcgctccacgatgaggctgcaagtcactatgcgttccacgccctccgtgcactctgggctctgccaccctactctgcagggtgctggtcatctgggcatcgccgagctcaggctggcacgacaggctgctcttgggagtaacagaccttttggtgcctttccagagccttaaacgtaatgcgtataagaaaggcagggaggccaggcacagtcactcacacctgtaatcccagagctttgggaggccagggcaggrggatcacctgcgcctaggagttcaagaccagcctggtcaacatagcgagaccccatctctacaaaacattttataaaaaaattaggcaggcatggtggtgtgcacctgtaagtcccagctacttgggaagctgaagtgggaagatcacttcagcctgggagtttgaggctgcagtgagctgtgagcacaccactgcactccagcctgggtgacagagtgaggccctgtctcttaaaaaaaaaaaaaaaaagagagaaggaaaagaaaaagtcaggcagtcctgatgagtggggacctcctgctgctgcaatctgttgatggaaggtttttgaaacagaggagcctgctctctggcaaccaggatggacaaatgagctgggacctgcgcccctctgccctaatcaactcgccccatgtccagctcagctgcagaatgggcatgaactcctgaagacagcaggaaaaggagtacgcccttgtgtggctgccaagcaggggagagcctggagcctgcacagatctgggaaagagcatcatttcagaaacacgtcagctttgcacgtgacgggagggtgcttctgccaaaagtcggcaggtggagagcgacatccctccgtccagcgtctacgtgggcggccctgcacctctctcagcatttttactctgagttcctttggtgatggagaaataaaaagagcccaggtcgggcatctgttgtattccatcgaatctcagacaacaccaattttaagacttttttgtttgttcgttcgtttgtttcctatagaggtaggctgttgctgtgttgccagggctggtctcaaactcctagactcaagtgatcctcccactttggcctcccaaatcacactggaattacaggtgtgagccactgcacccagcccacataccattatttatttatttatttatttatttttgagacggagtcttgctctgttgcccaggctggagtgcagtgacacgatatcagctcactgcaagctccgcctcctgggttcacgccattctcctgcctcagcctcccgagtagctgggactacaggtgcctgccaccatgcccggctaattttttgtattttttagtagagacggggtttcaccatgttagccaggatggtctcgatctcctgacctcatgatccgcccacctcggcctcccaaagtgctgggattacaggcgtgagccaccgtgcccagccccacgtaccattattttaggaatcttcaagaaagaaaaaactgctgcaaattaaactataatgtgacagtgattgtttaagacctactgaaatttcagaaatgttaacatgaggaaaaaaatgtacgtcttagaattggtatactaggaccggccgggcacagtggctcacgcctataatcccagcactctgggaggccgaggcgggtgggtcatgaggtcaggagttcaagaccagcctggccaagatagtgaaccccatctctactaaaaatacaaaagaattaactgagtgcagtggcaggtacctgtaatcccagctacttgggagactgaggcaggagaattgcttgaacctgggaggcagaggttgcagtgagccgagatcgcaccaccgcactgcagcctgggcagtaagagcgaaactctgtctcaaaaaaaaaaaaaaattggcctaatagggagtaagggaattaatactcactgagtatgtcgctggtgctgggagctgtaccagctattaccgcactacctggtgggaatttcacagcaaatattcactaaggaacttatttttctgtttcacaaatgactaatactcagagaagttatactaygtgccttgcattgctgagcggaatctggaatccacgcagctgatctttctctccgctctgctctgcatggacgaggcagccctcaggagagattccaccgatgtagtagccagatgtagaaactgtccacaaataggccgggcacagtggttcatgcctgtcatcccagcactgtgggaggccagggtgggcggatcacaaggtcaggagttcgagaccactctggccgacgtggtgaaaccccatctctactaaaaatacaaaaattacccgggtgtggtggcgggccctgtagtcccagctactcaggaggctgagacaggagaatcacttgaacctgggaggcgggggttgcagtgaactgagatcatgccactgcactccagagcgagactccgtctcaaaaaaaaaaaaaaagaagaagaaaatatccacaaataaccttgagaaaagacaagcctgtgtaagattcagaagcaccattgaaagacataaaagaagctgtacacgcagagggtgttgccacgtgcccggacctgaagacacaccctgtgagctgtctgctgacatgacaggcagccccaccgttcccacaggaatccgttcattaccagtaaaaatacccacatgcttgttggagatttttctggaactctatgaatggatctgaagttgatccagtagaggaaacatgtgagaatatcccagaaaatgtggggagagaaaaagcttgcaggattccacataaagctgcggcagttgaggcaggcagcaacaaacctgtgatacgagctcatgagctcagggccaagagccaagacagacctggagccatggggaattcatctatgtatgacaagtatggcatctcaaaccgtggaaaacgggcagatgagtcagtaaatgtactgccttagttgctgctggtgtaaaatgaagtctaagcctgacctccccgtaaacagcagtgatttccaggtggattaaagatctaagtacacaattacgaggacaacagaatgcagccgggtgtgctggcacctgtggtcctagctacttgggcgtctgaagtgggaggatcacttgagcctgggagttcaaggatatagtgagccatgattgtgccactgcactccagcgtgggggacagagcaagaccctgtctcagaaaaataagaacgtcaacaaaggatagtagaactggaaaaggggccgggtgcggtggctcatgcctgtaatcccagcacattgggaggccaaggtgggcggatcacgaggtcaagagatcgagaccatcttggccaacatggtgaaaccccatctctactaaaaatacaaaaattacctgggcctggtgacacatgcctgtaatcccagctactcagaagactaaggcaagtgaatcgcttgaacccgagacgtggaggttgcagtgaagtgagccaagatcgcgccgttgcactccagcctggtgacagagtgagagtctttctcaaaaaaaaaaaaaaaaaaggaaaaggaagtttataggctataccaataaacatctgaaaagatgctcaatttcggaaataataaagaaataaagagaaaatcaagaaaactttttccctaaaagattgaaaataagacaatcgaggctgactagggtggagcaggtgctgccctacgtgccagccaggggtgatgggtgcagccccaccgagcactggcgggtggtaatggtggtggaccagcagctggagatgctccttcgagggagcagtcgggcagtcacagggctgaaaagtacctcaagccctcacacagggaccccaagtcttgggggagcgggtacagtgacagatgatgagatattcccatagagaaacactacagggcattgaaagcaaccaggccaggggcggtggctcatgcctgccaaggcaggtggatcatttgagctgagaagttcaagaccagcctgggcaacatggcaaaaccccgtctctaccaaatacttagctgggcatggtggtgtgcacccatggccccagctacttgggaggctgatggggaggattgcttaagcctgggaggtggatcgcgccacttcactccaacgtgggtgacagaacgagaccccatctaaaaaaagcaaccggggtcaggcacagtggctcacacccgtaatcccagcactttgggaggccaaggtgggcagattgcttgagcccaggagttgaagaccagcctgggcaacatagtgagacctcatttttactaaaacacacacacacacacacacacacacacacacacacacacacacacaaattagccgggcgtggtggcatgtacctgtagactcagctactcaggaggctgaggtgggaggatctcttgagcctgggaggtcaacgttgcagtaagctatgatagtgccactgcactccagcctgagcaacagagtgagaccccgtctcaaaaaataaataaaggcatccaggaacctcagcacaggaaagtcccataaaagtgctgagtggaacacaggaagcctcccagagagatggataatggggtcccgtttttgttctttgaaacctgttgcttatctagaaggaaacctgagaggagaatattggccgtgagcagtggttgccctgggaagccgagatgagagagaaggacatctgctctcgaattgggaattgctttattattggaattccgataacaaacagccgttttgtcatctaaatcaagtgacattttttttttaattgaggcggagtcttgctctgtcgcccaggctggagtgcagtggcgtgatctcagctcactgcaagctctgcctcccgggttcagccactctcctgcctcagccgcccgagtagctgggactacaggtgcccgctaccaggtctggctgattttttgtatttttagtagagacggggtttcaccgcattagccaggatggtctcaatctcctgaccttgtgatccgcccgcctcggcctcctaaagtgctgggattacaggcgtgagccaccacgccctgctcaagtgactttttaatgccattttcctttctgtgtgaaacaaccaagtagaagagaaccgcgtcctcacctctgttggaggaagtggtgttttcccgcagagcgtttccctcgccagcctcctgtgcagggaggggccaggacccagtgaggatgcctcgcccgccccacgctccccagccctcctctgctttctggcatgttctctctgccctccacagtggggcccttgctcccattgtgacttcagtcatccttcaccgaggtcctgccctacccaggctgacccagaagcctaggagtccagctccaggcctgcktctgcggtgtctccctcgccgctctctccctcgcccacgctggggggcttttggagrctgggtacctgccacaccctgccacacacactctcctcttcacaggcctgcatcatgggggctgcggggggcctgccctcctgatgggcgatgggagcagagggcagcaggcttcmgggtcagggctcggcaacacagccctgggctggaccacggcgcctgggcctggttccctgcaggcctctgcctgggcacacggggcaccgggacctgctggaggctgctccctctctctcctgccctgcaacatgggagcagccgaatcattgctgggttttctgtaataagaatgtattgttagttccagtccctaattgacctttgtcccttccttcccctgcctctctgtgcgtcgctggactcgccaggggagttctcaggtgagtatctcactctcctgtctgtctcccctctgtgtgacggggggagtgggtggacgggggatgccccgagctatcccgtcaccgtggctgtgtggactgccccccacgtcgccgcagcgcctctgcttctgctcgcagccaccgccgctcggaagcttgttcggtttgctccaccagccacttgacaatgacctggatatccaacccccccagcctgaggagtcccccgcgggccatttctgaaggccctgcggagccctaagccacgcacggcagtgactggacatggccaaggccagctctggggcctcccctgctgtcaggcacaccccagaagtcaggggtccttgaagcccctacgaagcccagcccggggtcccctccccacgtgggtggacaggccgagtcctgctctctggctgcacagcaggaggctccgaggccccacccagaggctgtccagatgcagccccccagcctccaggcacagcccatccccacaggggtgccttctgccctcagccccacccagcccagaatttggggtgagatgttagcttcctgctccacaggtgacactggcctggcagtcttcatgtaaccccaaggataaactttccagaaggaatagctggctccatcccatctcctgccctcctaactccctcctgcacccaccctaacccagcagacccagctctgaattcctcccagcctgctgtccacacgggcttaacgcgcttctcttctctccctttctccctctcctcccgccctggttgcccatctcctgtgggacggggacggctccctagtgcgcgatgatttctttggtaaggctgaggccccgttccagcgtgcgtcgctcctccaccccgacatggtctcctgcttcatgagccgtttgctttgttctgcatgatggggacagtgttggggccgccggggtcaggggggcagccctgagtgaagctcgctctgtccaggctgcctctgggctgtgggaggtggcgacttccccaagggacagacttgaaggcccgaggagggcagccccagcctctctgaaccccacaagcgccgggcagaccctgcctgtggggaggaaggcccatgtttgaggcaagggaggtcataatagagacagcaggcaggacccctgagcccaggcacagaggcgtgtgatgctgtttcatgactgcatacacagtgggggagtgtgtgggagggcaggaccttggagtttctttccatccttttggggtttctggggcatgcttgcagggagatcagtccaggtccacttggggcctcgtggtagaggagccttcagtcctgccagggagccctgtcctcacagccgcgccccatcgccgcaccccagccctgctggccctgccgtgagggccaggcctctccttgcccacctgtcccctcaccgcagctccaacatcactcgcctagggtggtggctccgagagggcctgcctggtgacagacctgctgggggcactgagatggcagcccagcggccattcaggggcctgcgtccggccagctggcctgtgacattggtcggacatgagaaccaccccaaggcctgggagcctgctctgtgcacagactgcgggcccagcatgagccccgcccttcacggcccccgctccctgtagatcgggcgtcatccccagccaggctaccctctttggaagcgttgttgccctgaggcaggtgcggcggcatcrgtgacctgttttgaagggcacaggtgaaacctccgcaccttctgtttcaggaatgggcaaagaagtggggaatctgctactggaaaactcacagcttctggaaaccaagtaagagtgcccttctcctgtgtggtggggctgaggcagccctccttgtcagggctgggagagtgagccgggccagagggcgccttggggagcacctggctccaacgccagcagctgtcctcatctctggcgggaggaacttggagcaggactctgcctggtttctttacgaagcttgtctccaggagcctctaacaagggtgctatagggtttagctaagatggggatggggtctcccattcagccaccttcctaaccaggctgtgccttctccagggcggaagtgcaggcgcccctggcaaggccccttcacgtacctgtatgccgcrcccgtggcactcccatctttctgctttttcaaagaaacgccttgaatgtggtgaagaatgacctgattgccaaggtcgaccagctgtccggggagcaggaggtgctgaggggcgagttggaggctgctaagcaggccaaagtcaagctggaaaaccgtatcaaggagctggaagaggaactgaaaaggtgagggcagggcatggaaagctggtcagagagggaccccggcctcagggctctggagtggctgcctcctccagtgcctgctctccagcctgagcggctctgtgcatagcctacctacctccagctccagctcacagccactccaccccaaccagcagagtggggccgtggtctcctcctgagcctcctacagcacacgctgggcctgtctcacgcgttccttctctgcacagctcccaccatcccactcctccagccctttgatcagccaaggtttggccacggcccccggagagctgtatgttggggctccagcccttctctgatggacagaggaggtgtgggcgctccgagaccatgcctctgcctaagaagggacccagatctgctctgggtttgccaaagccagggcccctctgctttgctccccctccgcattcccgggcagccaggatggacggctgggcttcagagcactcatgcagcagtggctcagggccacctgtccccagggaactggaagaagcgttcagggccctgaaccaaacggctgctgaaggggtccctgtggggagagcccccagccctgcacagaggcaaggacacaggttcggggcgggcactgcccgctatgtgttcccgaggcccctgggaggccctcaccctccctgcctccttccccttcccacagagtgaagtccgaggccatcatcgcccgccgtgaacccaaagaagaggcggaggatgtaagcagctatctctgtacagaatcggtacatccactcttcactcttcacatgcggggcgtccaccattcacttttcacaggcggggcggccacygttcaccattcacacacagggsgaccaccattcaccattcacaggcagagcggccaccattcaccattcacaggcagagcggccaccattcaccattcacaggcggggcggccaccattcaccattcacaggcggggcggccaccattcaccattcacaggcagggcggccgccattcaccattcacacrcagggcgaccaccattcaccattcacaggcagagcggccaccattcaccattcacaggcggggcggccaccattcaccattcacaggcggggcggccaccattcaccattcacaggcggggcggccaccattcaccattcccaggcggggcggccactgttcccacacattcacacgccgggtgaccactgttcatacgcattcacacgtggggcagccatcattcccacacattcacacgctgggcggccaccattcaccattcaccattcacacacagtatatcctactattcacactcggggcatggggatgcggggtgcctcccggggactcaccggcgcttctgtctctgtacagaatcagtatatcccacaattcacatgcagggctggggtgggcacgggcagggggcccaggcgggctcctggggactcgccggctgttctgggctgacagctctcccacccctcctgggtgacacctgaccccagcggcatcatctgccaccccactcctgagaccacatggagtcagaatcaggcccttgggcaggaccacagccctggcaggatgccgggtcccctgtcagcacccaagtcctggtgcatgccttttgtatggttcccctccccgcttgccgacacccctccacaccgcttcttgcctgaggatctgaaggaaattggcactgagatccacctatacgtgtaggcaccccaggaggaagcaggtgtcacccggcctccgagggctggctgagcctctgtgcccctccctccgcaggacaaaatccccatggcccagcgccgccgcttcacgcgggtggagatggcccgtgtgctcatggagcggaaccagtacaaggagcggctgatggagctgcaggaggctgtgcggtggactgagatgatcaggtgggagttgcggccaccccaggaggggctgygggatcatccctgacggcaggactgcggctccctcctctgcacctccctgtcttctggggggactgaagtgcgctgggtgcttcctggcgggagccagagagtcgcaggtaagggaggcgtgagggcactagcaggttgctccctgtgccctcccctgcagagcgtcccgagagcacccatccgtccaggagaagaagaagtcgaccatctggcagttgtaagctgggggcccctgggggatgtgggcagcagctgcaggggaaggggcagggaggttccctggtcctctgcccacccctcacctccctgtgcctctggcagcttcagccgcctcttcagctcttcctccagcccccctccggccaagcgcccctatccctcggtgaacatccactacaaktcacccaccactgccggcttcagccagcgccgcaaccatgccatgtgcccgatctcsgcaggcagccggcccctggaattcttccctgacgagtgagtgtcccrcagcccccacttgtggcctgcaatggggttggggaggccctgtcctgaggctcctcccctccaggccctgaagcgggactttgagggcagcctccaccttgctggccacatgccaggggccgtgacctctccctgcacactgcctgcccctccctgcagcggggagctgggctgctttggctccacggtatttggttcaggatgtcccttggcagaggctgtgcccaccaacagtcagggggctgtgctgggctccacggtggcctctgcagcaaggagccgtttcaggcgtctgtccagcagggagtcgctggtcatgcctgtgccccggcggcactccaggtcccggtctgtggaaccctcagtgactgtggcagcagagcagcctctgggtcgagcaggggccagctgtggcctccaagcccaggggcatagccggtgccaggaaagccacccttcccagctgggcacccagtgccgggaaagccacccttcccagctggrcacccggtggccgggaaaaggcgaggatgggcccaggcgggcctccctgccgtgacctcccccaggacaagcctggggcactgtgggggccgctcaccctggacagagacatcacccatcattcttccactcagcgactgcacgtcctccgcccgtcgagagcagaagcgcgagcagtaccgccaggtgcgtgagcacgtgcgtaacgacgacggccgtctgcaggcctgcggctggagcctgcccgccaagtacaagcaggtgcgggcgggcgctgcggggaccgggcggggccccgcagaggcggggcgggggtaaggggcggggcgctgtggggcggggagagggcggggcagtgctagggggtgggagaggacggcgggtggggcggggcctggcaggttcctagtgagcctcctgggcaggggtctggagggtcggagaaggagccccgcggctcccacgcccccacctgcctccagtcttgaagtggctstgccgccagaagctggcagccctacctgtctcagatttctggagggatgggtaggagccagggttcgtgcccacggcgcctccctgctccctgcagctgagtcccaacgggggccaggaggacacgcggatgaagaacgtgccggtgccggtgtactgccgccctctggtggagaaggaccccaccatgaaggtgagcccgcgaggaccccgctcaggctggctgggcgagcgggaggctggggagtgccggtgacacccgacctcggccctgcccttgcagctgtggtgtgcygcgggcgtcaacctgagcgggtggaggcccaatgaggacgacgctgggaatggagtcaagccagcgccaggccgcgaycccctgacctgcgaccgcgaaggagacggcgagcccaagagcgcccacrcgtctcccgagaagaagaaggtgagcatggccgaggccaccgggcaccctccctggcttagtctcaggacagctcagctgcagagcatgctgggagtgagacacaggacagctggggacagcacccggaagcagggcagcgcaggggctcctagactgcgggaagcagtgtcttccctcaccaggactgagccgccttctgggttttcagttttcaccccccaggtggcctggagtgggcctgcactgggctgcaggggtcaggcaggcagcaggcacagaggagcccaggagcggcagagcttgcctcccagtggtgggaggcttagttttatgcccagcttggrcctcttggagctcaggggcctcttctgtggaggcgaaaccgtgtctgtgagtgctttagagtgcagtcctgagtccgcattgttctggtcctgggggaggacagccatgtcccctcaagctgtagtcaaggctggatcctgacagattctgggagccccatggccctgtgctgccacngggtagcctcaagctcgggctctgaccttgatcccgtgccctgaaacaggccaaggagctccctgaaatggacgccacctccagccgggtgtggatcctgaccagcaccctgaccaccagcaaggtggtgatcatcgacgccaaccagccgggcacggtggtggaccagttcaccgtctgcaacgcgcacgtgctgtgcatctccagcatccccggtgagcagctggagtgggcgtttccactcgggcgccactcccttttactagcaagctaagtaaaagccctgccacacagcagctgccttctcggggtgtcctgtggacacgggaatgtggcagtggacggtgggaggggcagcacccagtcaagtgargccctgggccctgtttctgggaggaagctcgcggcagcctcggcctcttctccctacctactcaggaccccacgcttacctggttagagggtgacgggtgggcacggcctgcagcttgaagcatcactcggagaccacaggaaaacattkcctcatgctgaatgtgaaacctccagttgggccgaaggggctatgggggtgtgggtgaggagcttcgtgtcacccctgtgggcagtagccttggtgatgttctgggccagccccaacactgggaggacgaaggggtgccgagggctctgccaggtctctggtgtgaaaccacagggccgtctggggtcctgagggtctgccacaggatcacaggttgtttgctcccagaacmagagtcttactactcagctccccttggcccaggggccyacccaacagagcaggcttgctggagtcccagacctccaggcagagggtcgtgggtgggctgtgggtggagcatgtgtggaagctgggtctgctgggaaagtggaaggccagccccggcttcctctgcccctgtgtaagtgctgggcacgcccttgcagtagtgggttcccccgcacaggctgacgggcygtccctctccccagcggccagcgacagcgactaccctcccggggagatgttcctggacagcgacgtgaacccagaggacccgggcgcagatggcgtgctggccggtatcaccctggtgggctgtgccacccgctgcaacgtgccgcggagcaactgctcctcccgaggggacaccccagtgctagacaaggggcagggtgagtcctgggcgagtttcccccatcccctcattcccacgtttctgcccagcccaagctcacctctcctaacacaggggaggtggccaccatcgccaacgggaaggtcaacccgtcccagtccacagaggaggccacagaggccacggaggtgccagaccctgggcccagcgagccagagacagccacattgcggcccgggcctctcacagagcacgtcttcactgacccagccccgaccccgtcctctggcccccagcctggcaggtgagctcttgggctggggcaggagcagagggaaggcttgcagaggtgggaagggcctcggggtcttggggcaggtgcgtgctccgtggccccccctggagccaccgttcttcctgcagcgagaacgggccagagcctgacagcagcagcacacggccagagccagagcccagcggggaccccacgggagcaggcagcagtgctgcacccaccatgtggctgggagcccagaacggctggtaggaagggcccggggcaaggtggagggagggtcctgggtgagcccctcgcccatcgccgcttccttccctaggctctatgtgcactcggctgtggccaactggaagaagtgcctgcactccatcaagctgaaggattctgtgctgagcctggtgtgggtgaccccagaccgagggccgggcggcgcgggggaacggggcggagggggctggcacagcctggcccaaaccaggctcaccgcattcctgtttcaggcatgtcaaaggccgtgtgctggtggctctggcggacgggaccctggccatcttccaccgtggtgaaggtggggcctggcagcacggggtgtgtgggtggcagctgatggccctggcattgtttagccaaggggctcccggggttccaggcctctccttagtctggcagtgggtgtctcaacccgatgccctgagcagaggtggggcctggccaggcctgagcaggtgtccggggctccctccagatggccagtgggatctgagcaactatcacctaatggacctgggccacccgcaccactccatccgctgcatggctgttgtgtacgaccgcgtgtggtgtggctacaagaacaaggtgcacgtcatccagcccaagaccatgcagatagaggcgagtgccggccagggccccggggaggggaagaggctcctgctggccagcagctctcccgcatcttccatacggaagtccacgaggccctacgtgggncccatctcccctgtaccacctatgactcaggctngaacaggcgcaaagcaggcgctggctgggaggtctgaggggactgcaggtggccctggagctgtggcaggtttggggctccccacttcctctcctctccccagccctgttgatgggcagccatgactccacagaagtcatttgacgcccacccgcggcgggagagycaggtgcggcagctggcgtggatcggcgatggcgtatgggtgtccatccgcctggactccaccctgaggctctaccatgcacacacgcaccagcatctacaggacgtggacattgagccctacgtcagcaagatgctaggtgaggggccacgccagntgggktggtggggngctcaaggccagccaccctgaccgctctcccccacaggcactggcaagctgggtttctccttcgtacgcatcacggccctgcttgtcgcgggcagccggctctgggtgggcaccggcaacggagtggtcatctccatccccctgacagagagtgagtggcctgcacncctgcaggggcagtggtgctgccagaggtgtacgtgggttcacggggtggctctgcagggccaccttggagggtgccttgctgcccctacgctgaccgctctcctcttctcccatgctcctcccatgtccccagctgtggtcctgcaccgaggccagctcctggggctccgaggtaagcccagccacctcgtgtcccctcacrggagcctctcccayyctccacctgtatgcgggctcagcgcctctgggttctctccctgcagccaataagacatcccccacctctggggagggcgcccgtcccgggggcatcatccacgtgtatggcgatgacagcagtgacagggcggccagcagcttcatcccctactgctccatggcccaggcccagctatgcttccatgggcaccgcgatgccgtgaagttctttgtctcggtgccaggtgaggctgggcccctcctgccatccacatcccctgcatgccagtggccgccgcctcccccaggaggccgctgtcctgaatcgcttctgccatcccagggaacgtgctggccaccctgaatggsagtgtgctggacagcccagccgagggccctgggccagctgcccctgcctcggaggtcgagggccagaagctgcggaacgtgctggtgctgagcggcggggagggctacatcgacttccgcattggtgagcggggcccagggacagggctgaggttgggcgcggggggagcctggccstcactctgctgctttgcccgcaggagacggagaggacgacgagacggaggagggcgcaggggacatgagccaggtgaagcccgtgctgtccaaggcagagcgcagtcacatcatcgtgtggcaggtgtcctacacccccgagtgaagctgctgccctgcctggcccgacctgtacataggacccccgaccacctgacccccgcccggcccgcggggtagccagccaggcgccgccgcccctcttctaacctctcaacctgcagctttcacctgagtctggcccctccagcgggcagggagtgcggggatgcggatcagctgggaggaggaggggaggggwrcttccacccgaggggaagatgctctcgggacagtttcccgggcagctcctggccagcttccagcccagagtcctcaagtccagggcaccttgggcccagcgcaggcagaatccgaggtggtcctggctctaccctgggcctcctactccccagcacccctggaggaggcaggggctccccgccgccgaggctgcctgccctgggcccacctctgcatgctgctcatggggccaccctgcctcctgggccctcactctgcctaggggagctgggccaggcactagcctttgcccagggaggtgggcctcaggctgcccaggtgcctgcaccccagccggccttctctggggcctccccgtcgtcaagcctctatcctgtctgtccccaccccagctgtcccctgcccagggarctggcataaaagcacgaggcccggctccctggggcagctgcttgagaacagagactgctaccccatcctgcccatgcaggcaggctcttgccagccccgttctgacccgtgtccccccaggctctgcctgggcagaagactcaccttggaggagtgggccctggagtcctgtccctcccagaagcccccagggtgggatttctcaggctgccagggcaggcccaggcctcaggaagaaggggaggcccctggcctctccgggatcagtcctaggacacaggctcagcctcaggttgatgggggatgatgtgctcccggggcctgcctcctgcacggggctccacggagcccagctcccagacacgctactaagtgcctagggttgcccgctgtggcctgctcccagggagcaacagagaggccaccaagcagaggcccgtggggctgaggatggagccgcccccagccgactccaagcccgcagagggcagacgccaccctggactgctctccctgcccagctgggcctctctggcctattcctaccttccaggcccactgcactcctgtctgggaggcccttatgagggcagcccagcccccgcacccacccccaaccagagaagcacagatcttggggagctgccccacaagccccgctggccaccgagggctgcagccgctgcgctgccggcttctccccaccaccctgccacctccactgtgatgtatgtccgctccctcgtctgttcccccaggatctcgaagtgactccgggctgagcagtggggcggctgggggaggggtgacgattctcctcaggctttggccctgcaagcaaacccacatatctgctctgtatgtaataaatgtcttaacgtcgtagctgcctgttcctgggcccaaaycgaaacgaaaacgaggactttattataaaaaaacgttggaccacgttgggctgggcaccaggacagtgtcctggcacgtttccaggcgagccgcgcaggctcctggagcagctcctcgggcaggaaaccctgtacgccagggattggagaggcctgcgccaccctccatgcaacgtccagacaggtggatgttcagcagcccgtccaaagggatgctccaagcgctgtggggtggggccagaagcccgcccacctgggccctggaggaggctggagtgtgagagcctctgtgacgcgcatctgccgggctactcatacagccagtgcccagcgctgtcctcccagcagaggagctcgtctgcgcggaaccagagagcgatctcgcggcgggcactctccaccgagtcgctgccgtgaatcaggttcctgcgcggaagaggcgcgtgtgagcgtgggaaagagacctccggcacgggtaccacgcaggctgaacagggggaggccggacggggctgggaccgtccccggggcgggccttacttgccaacctcgatgcagaaatccccgcggatggtgccgggcggggcgtcggccgggttcgtggctccgatgagcgcccgcgaggtgcgcaccacgtccagcccctgccawacctgtgcggaggaacgggcgcggtatcacgcgggggtgggggtcccggagccgcccgcccgcttcccggatactcaccatggccaccaccggcccggaggccatatacttgacaaggcggccgtagaacgggcgttcacgcagctcggcgtagtgctcacgcagcagctcctcggaggcctgcggaagggtcaggccgcctgcgcccgcacccggcacctaggcgtccccaggtccccgctccccttccccccacaccgcgcccccgctcgctcaccgcgcccccacctgcaccagcttcagcgccaccaacttgaagcccttcctctcgaagcgccgcacaatctcgcccaccagccgccgctgcacgccgtccggcttcacggccaggaaggtgcgttcgtgtgcgccggtgcaggctgcggggcaggcggggacgggccgtcaggccggcccagcaccggccacccgcccccggcccgcgccgcgcggctcacccgcggggaagaggttagcgaagatggtcagcaccaggcagatcatgatggcggtgcgggagcgggatccgcggggcggggcggtggcgcccggggcggggcctgcgcttaaagaggcctggtcggggcgctgcggcctccgcggggaggctgcttcacttgcaccccggaacccggcagccgtggggggccggagggcagctgcggaggccaagtctcctccagcagctcggacactaactgtatcccccacaacccgcccaggtggttccacccacgcggcgccctgctccgcaccgcccgaaccccgccccccccgcgcccccccggccagggccacgaccacagcgtcagcccttctctccccggtcctaaagacagagcgcaaagacaccacgaccctgggtacttcttttctctttattccctttcatagcttctgccgggatccaggcagagagagcactaatgggggaaagggagcgagcgcttcccgctttccccagcgtgggccctcggagttgggtgtgggggcagcagggccagaggaaaggcacaggtggcgatttgccccagccctcccccctaagatgcagaccctcagaacacgtcgcggaaggtgagctccctgctccgagaggcagactcgggtgtaacgcaaagacggtttctttcatcaataaggtccccactgcctcacagcccctaaggccacccgctggttctggcattctagacgggggtgcccttggcccttcctttgtcttcctgttttgcagggtaatcccagggttccatgcgtatcctctgcacattcagcatgggctcctcggtgcttgtgtctccatttttctgtcgttctgcgataatcatggcccggaggagaggcgggtacggcacggaggccaggctgtcttccggcgccggcgtgaacgcggtgaaggcctcctcctcgtgcttgggcaccagccgccagtcatggtacatgacgtgttcgatctcccgcgcctcgctctcagtcttccctgatgaagaaaaagaggcgtctgcacacacttgctgtgccgtcggcggtcggcatcgaactgccgggcacccgctctcccgagccttacctttgaaggtcaggatgccccaggccttcccgtggtccaagttctgcaaagccagaaggaagcggggtcagctcgcaaagctctcggcccccgaggtcaggaggtgggagcctcagccacgcaaacctgcagggaggaggggaggcggggagaccaggcggctgcasgggcggggtgcggacggggtgcacgcacctacctgcgccgtgtagtcgggccgcacccgcgtgaggcgccagtagcacggctcgtcgtgctgccacagccaggacttgcgcgtgaccaggcggcccaggccgaagagcgggaggcggccgagcagctgcaagaggcggctctcgcggcgsacgtcggcccaggcccggaccggcagccggcgtccagagaacggccgcgtcaaggtctcgtagtccaccgcgtagagctgggagtcgcgcggcctgttcagttgctcccgcagggcgcgcacgcggcgggccagctccgcgatcagccgcggacgcaccttcttccgcgccatggcgggtccgcgtcctcagcggtccggccggaagtcaccggaagaggccggtgtcccaggctaaagtgttcggtcgcggccggaagcgaggaagaggtcggtccggccatggcgcgggttggacccgggagggcgggggtctcttgccagggccggggccggggacggggcgggagcggtcagcggcgacctccaacctgggagatctcagactccgacgctgaggactccgccggctcggaggccgccgcgagagcccgggacccagcgggtgagcgcagggcggctgccgaggcgttgcggctgctgcggccggagcaggtsctgaagcgcctcgcggtgtgcgtggacacaggtgcggcggagggcacgggcgatactcggggtaggaaaggcctttctccgccaggcggcgccctctgtccgactgggcggggcgcgcgtgccgaggggcctggggccgggcccgcctcccagtcgggggtttgtgccgaatggagactccccggtccggccacccgcccaggtagggcgctcgcgagggtggaaggaagcagtgaccgcgctcctctcccccggtcccagccatcctggaagacgccggtgccgacgtcctgatggaggccctggaggccctgggctgcgagtgccgcatcgagccccagcgcccggcccgcagcctgcggtggacccgagcgagtcccgacccctgcccccgcagcgtgagtggtcgcgggttcccgagggccagccgcgagttggctgttttgcttccatgatttcagccctggagctgtccctgaggcagctgccctgggccgtgcgcgtctcgcggatgggtaaagcaaggatggagaacgggaagtggaggtgcccaagccgttctgctggtatagagccgagctggctggagaaggttccgtctcgattcaggctgtggtctggattcctgccggccacagagacctggcctgagcttggccttggcaggaaagggaacactgggcttctgtagagcaggcctgtcagggcctgggcttggctggggccacgaaccgctttgctgctggactgcccaggcagggcccctggggcacccggggttgagacaggcagcagcgcgtccccatgtccccacagctgcctcctgaagtgtgggctgcaggtgaacaggaattgctgctgctgctggagcccgaggagtttctgcagggcgtcgccacactgacccaggtgctcgggtggtggcagtagtccctctctaatcaggaggggtgggttcccagccgggaggcgcctgctccgccggtccctgcccctgtagacggggctggagggggcatggggcaggccaggactcctctctgatccaaagccgtagaggtttctagggtgagatggagaaagctcctgggcacctgcggaggctacagctgctcctagaggatcctgagaagtgtcaggaggccggggtccgggcagtaggctgcaggcttcgtcctctgacagcagacagcctggcccctgcctgcggggagcagtgctcaggtgctgtggtgccaggtagcgtggggttaggctagaccccctgccaggtccctgtgtcccaggatcagtgtctctcaagctgctgctttgtgctaggtcaaagctaggctggagtacagaggtggaccaggatgaggggctcaatggaactgacatgtgcccgagcagccactccagggtctccttagcctctttggcctcgtgggaggcacagagctggttttctcagaaggggtaacggaacagaggctcctctcggcaccactggctctttttcaggcttgctgttctgcaaaccagctgtggcctggtggcccatggccataggccgcagcctcctgtgaacaactgtgccacacgttctcatcttcagatctctggcccaacccactgggtgccctggatctcccccgagaccaccgcccggccccacctggctgtcatcgggctggatgcctacctgtggtaccgctcactctcatgcccacagcagggctggctgggacgggggttcaggggaggtgggcacacttctggggttgctgtggcacagctgatcccacttctccaggtgggctctggcagaggccaagctcgggcagggcaggccccatggggagcggggaggaatggtcacctctgctcaggtctcgccagcacgtttcccgggggacacagcagccagagagcccgaaggtggccggtgccgaggtggccgtcagctggccggaggtggaagaggtgagggcctgtctgagctgggtgagtcaggtggcctgggtcccagtgattgggctgctggctgggtttggttcccagcgtggtacatggggcagctatcagctgtgtgtcccgggtagccttcctctggctcgtgcccatcagcttgcctcctccccaggccctggtactcctgcagctctgggcaaacctggacgtgctactggtggcctcttggcaggagctgagtcggcacgtgtgcgccgttaccaaggctctcgcccagtatcccctcaagtgygtgatgccaaggctgaaggggggcaggatcacctcaaggtagtggtgcctccccggccttttgggagctgctcacatgcggttctaaaaggcttctctctgtccccaggcagtmccgggaatcccaggccttctccttctgcacagcagggcgctgggcagccggcgagccagtggcaagagacggcgcagggctgcaggcggcctggcggaggcagatcaggcagttcagtcgggtcagcccagccgtggctgatgcagttgtcacagccttcccctccccccgccttctgcagcaggtgggcccctgcctcctccaagccctccaggtgcaraagccccgtccccaggcgccctctcatgcctttgcctgctcctaggcgctggaggcctgcagcacggagcgggagcgcatgggcctcctggccgaccttcctgtgccgcccagtgaaggcgggcgtccccgcagggtggggcctgacctctcccgccgcatctgcctcttcctgaccacagccaaccctgatctcctgctggacctgggctcctgaccacacgtgggaccaccaggacagcatgcagccttggggacagaccagacaccctgggcggttggggaggacccccagccacatgtggaccctcagcctgg

SEQ ID NO: 96138 - DNA, 26979 bp, Homo sapiens
taaaatgtacattttaaaccatggatgttcgtatcccggtcacttttgccatagcctgccacatgatcaatttgatctttccagggtcagatagtgccgagaggggagatgggtcagtcatccttacactttaatacagatccaggacttaattccccaaaaggatttatctgtaacacttttgaaatgacaacactgagtcatcaaaaagattaaattttactttgtaaccctgtttaggaaggcagggaatgcagtaatacagttcagaaagagagatatctaaagcaactaaaaaccagcaactttcaggttcctggaagattcctttttatgaaacaacagagtattccctagtgagacctaaacaaattagaaggtaagttattttggtacatggactttatcttgttcatcactgcattcccagcaactagaatggtgcctggcacataagaggtaccaaaaaaatctatttctcaagtgactgaataaataaatgaatgaatgaataccccaaaagtgagatatttcagggattgttgctgttgttttgtttggttttttgagacaggatctcactctgctgcccaggctgaagtgcagtggcatgaacatggctcaccacagcctcaacctcctaggctcaaaaggtgctcccacctcagcctcccaagtagttaggactacagaagtgccaccatgcctggctaattttttaattttttatagagacgaagtctcatcatgttgcccaggctggtctcaaattcctggactcaagtaatcctgccatcttggcctcccaaagtgctaggattacagatgtgggccatcacaccctgcagatatttcctattaaccatgagagtatagacatacaatatatctttgagagtatattgtattgatcatgcatggaaatgataaaaacattatctttccaaacactaatttaccttgccaaacaaattataagcagggggtggtgaaaatacattcctccacccaggtctagtgtgcctataggacaaattatgattttgcaagcctgcagtactgcaattcaatatctctttaaaacaaatattgggcaaaatgattcatttagaatttgcagcaacgtgaaaggtgagtggttgaacacattaatataatcaagcctgttaattatctctacacactttttgaagaaatatttaataaaacaatttctaattggttcacacacttatataacagagggtaatatctgtgaaaaagattcacaggtattccctttttaaaattcttttttttttttaattctttttatctcaaactacaaaatgttactgaaattcttactctctacaaaggattctcaaataacactttttttttttgagatagagtctcgctctgtcgccaaggtttgagtgcagtggtacaatgtgggctcactgtaacctctgcctcccaggctcaaataattctcatgcctcaacctcccaagtagctaggactacaggtgcatgccatcatgcctggctaattttttgtaatttttgtagggacagggtttcaccatgttggccaggttggtctcaaactcctgacctcaagctatctgcctatctcagcctcccaatgtgctgagattacaggcatgagccaccgtgcctgaacaacactatcattacacttaaagatcacttagtatgaacagctgctcattcttatgacctaagatgaactaaaattaataatcagcacaccatctacccaaatttaacttttaaaaataaattcttccaaacaaaagatttcttttcaaccagcttctacaatgcatactagaagttgactaaatgccctgcaaagactaaaatctaaatcacatgtgattaaaagctcaacccctggttatttagtaccataggagataaggaaatcgccaccaagcccaggtttcatctcaactcttaaattatgactcatctcagtaatggcccaatggttccacaacaccatgcttaggaacacttgcaatgagatgagcatttgcatctcaaagcatacaagctaatgtctttttttttttttttttttgagacaggatctcgctctgttagccaggctgaagtgtgtgggtacaatcatagctcactgatcctagctcactgcagcctccatttctctagctaaagcaatcctttcgcctccgcctcctcagtaactgggactacaggtgtgcactaccacacctagctgttttttgtttttgtttttgtttttttagtagagaccacgtctccctatgtggcccaggttggtcttgagcaagcaatcctcccacctccgcctcccaaagtgctgggattacaagcatgaagcactctactgtctttaacagttaacactatacctcaaccaaacagtataactgctctcacaatggccaaaatgaaaatgcccaataaaaaatatttatctaacttttaaatgtttcccgttaaaacatgtcacttatagaaataaattgagtttttagtttgaacaaaataaaacatctgtgtatcataaatgttaaaagcatttgctgctacaaatctggctttagcattctaataaatcaaaaagcaggtataactgtagctcagtgcttatgccttaaaaagtttacctgcacattttgcacaagatcaggtggacacaagtcgagagtaccacacaattactgagggatgtgatacttttggcagagcgaagaagtgggcagcaagtcatgatttgcctattatgctagacccccccccccaaaaaatctgtttactgttcaaatttatgttaaaaccatcttctcacttagtgaggtcatggaattctggagttggaaggcatcccggggcaaaataactaatcaccctggccttatcagactgaggtcctgaaagaataactgacttgccttcattgttggttgatggcagagattggactacaactcaaatttaaggagcttttaaataagcctacaggctgccaatgtcatggtaaggggccctttcctgctggtctctcatttcttcaaagtttttccttccaacccacttcacaggtgaaagtgacttgcctgttccccttctgtgtattgacactttcttccactatttctcagttaacagaattccccaacgtaaggatacttcaatgacaatccctaagagaatattatctggggacagcttccaaaatcatgctcgctaagcttgaacaacctcaacaagacaacgttttaaataaaatgttaaggaaattaaaagaaatacaaaaaagaattaaaattaaatcttgtagttgaaacaattaaagggtccattccagtccaatactccgacaactcagttattaacaaaatgctcttaaagtatgaatactaagtgtgaataaggacggagatcgcaacaacacatgtagggtgactgagaattgttcctgaggctacaggaggcaaggattagtattattacactagcaaagaagtggcaggtgcacttcccaccctctagaaggtgcgcagcctcaaaccctcccctgaagaggccagaaggactcaacaagccctggaatcgagtagagcgaattcgctctgagggtccgcggaggccagacggaggaagaggagccccgacccgccttctcagcagccccccgcctctcccctcttccctcatcacacgagcccccatacctgtgagatagttggtccacttgtacaacacccsctccatgcttcagagccccacaccgcgcatcctcccggcccggcgccggccgcggtgatggggtaggcgcagggcctggggcagcccctcccggcccgcccgggccccctccgccggcacgaagccgctttctgcctgcgcgcgccgcagggacgtggcggcctttagaggccgggacagcgggcgcagcgtggagcttgggggccgcgaggcgcgggcccagacattcccgggtaagcctcggcggcggcggccgcgacaacggcaaaaatgcgcccgcgaccggcctcctgctcgcgcttccgcagcccggctgctccctccggcgccccggcgctgcctcttcctcgcctgccttccttccccctgggctccccgtttgttttcattgaccccgacgtcgatttcacttcctggatgaaaggggccggatcgtcccgggaaacccctccccggcggcggggctgaaggagcgggcgcggcctgcggcctcgccgcctagccggaggctgcgcgaggagggcgggccggcgcgtcacaccctcggcctgccagccagggccgcctttactcctcccacgggccggtggccaacagtcccgaggctcccaagtttccccttggccgccaaggcccaggctgaccgcccccgggggacaagaccttcgagctccgctgcgcgcgcagccccggtgcctacctaaggaggagctgcccgcacactcatcccgcgggcacttagttctctcgggttttcctgggttttcttcagaaatacataatatcctgtttcttcatgaaatcctgtttttattttacataaaatcctgttttttcttcaaaaatacataaaagccttcctatttctgtttgcttcgtattttcctcatattcaaggggtctgaaattatctcctaggaaggcaatgtgcagcagacggggtcctctgacaaggaatggcgagggcccccaaggaactgtcatcacgccgataaccttggatagccacaattttatttagaatataaaacatggaactcgacttcggaattttagtctagaaatggggacttccccctagcttttatgatttttgaaactcctgcttggacgcaattgtcatcttgcataatcgacagtaattttcaggtttatggaattttgcaaactttaagcaaagcacatcaatcaggctcagtgctgcggcttttcttcgcatcaccgaggtagaatagcacctctactcccagaacttaatccaggcgaatgcagaaggcctttgctggttttctggtttgggtagtctttgggtattcacttggaaacaaggcgaattgatggatggatagagtgatggatggatatgtaataaatataatatagttcaatgacaggatccagatggtgggtgtaggagagtttactgtagaattcaactttctgtgtattttaaaggttttcatactaaaattggtggtgaagtggtgttgtcacacagatttgaccaaatccctgctgcgtattagctgtgagattgggacaacatgcccaatactcaagttttcttgactgatgtggacaattacgtatcccatgggatggtacaaaaaagtcaaaagaacattccccgcactaccagaggccctcgaatcaagggcggccccgagtggcggggaaaagaaatgcaagccagcggaggatgctgaattgtggaggtcggctctcggaaacgcctgcagccaggcagaggagttgcggtaccgcagtttcgttgcatcgggctggccttcaggttgtgcgactcagcctggaacctctgaatgcaagattccgacctgagaatgcgcttcaaggacacctccgaagcacccagaaagccaccgccagcctattttttacgctccttttccagcatgcctctccctccccccagtatctatctgctcgttccctaggggtcttagaagccttttgcttccagaaatgacaaccatattccctgactctacgacatcccaggctgtttatttcgtcttatgccagtttcattttagaaaatgcgaatgttgtcaccgaaccctgaggaaacctgctgtaaaatacgcgggtttagcgagaagaagcggagcgagtgtgcgttgcgatcttaaagactgaggacagccagcccgagggcctagaaacagcgttaaccgcgctgagcccgctgcgggaggcggaggggttggggccatgagagggcggggccgcatctatggccccgccccggccctttgtgacgcaggacaacgcctgccacgcgtcggaactcggccgcgggacatccacggggcgcgagtgacacgcgggagggagagcagtgttctgctggagccgatgccaaaaaccatgcatttcttattcagattcattgttttcttttatctgtggggcctttttactgctcagagacaaaagaaagaggagagcaccgaagaagtgaaaatagaagttttgcatcgtccagaaaactgctctaaracaagcaagaagggagacctactaaatgcccattatgacggctacctggctaaagacggctcgaaattctactgcaggtaggaaatgctgcgagctgcccgtgcgtccagttgcacaaaatcttgcctgcctccaccaagcggaagcctcattggttggttggttggggttttattttttaacggtaraagttgagccctttattcattaaaaaaaatcacattatatggcagtgtttctctaataaactgaatatttttatttaaagtattgaaaatgttgtggcaataaattatcaaaaatacgatacatccacacacacatcaaccaccaccattacccttgggacctccagaattaaatcaaggttctgcctataaggatgttcacatttttcccttgccagaagtattgagtctttacggaggaatacatggaataaagagatttaattctggccttcagaagcacgatttttataggttgtggccactttctatcaagaaaaacagttacttccctggtgacttctggtgggccctgctccctcattccacctggtgcctactctgatttaattgatggcttattactcagagggagaatcttttctttaccctgtaaagataggactgggaaaaacagttccatccatttagaataaaatagagaaatttaataagaatttatacaattttataatttaataagaatttaataaattatatcattagaatttaataagaaaatatrccattttaaattactattaaaatgactttttgaggctaaaactgccctatcatttttttacaacaaacccagggagttaaatgagttctttgtacaagccatgcacctagttaggggctggagacccattaaaaagttaactgttgaatagtttttgtaaagataacaattttaaaaaatgagatggctgttaatgattaactttgggcaaatcatacttctttctggtgattatagggaagtttgagtcaaacaccccattaagggttttagaaagagtgattatatgggaatgatggttagagaggactccaattttaaatgcccagctgtattttcaagtttgatttcttgaaatcagtttacttaagtattgytttttgttatagccggacacaaaatgaaggccaccccaaatggtttgttcttggtgttgggcaagtcataaaaggyctagacattgctatgacagatatgtgccctggagaaaagcgaaaagtagttatacccccttcatttgcatacggaaaggaaggctatggtaagatgtttaattttaatttcttgttttagttatatttaaaaaatgattaatagatttctgggtatataggtctgaaagaattgaaagcacagtctcaaagaaatatttgtacagccatgctcatagcagccatgtacaatagacaagagatggaagcaagccacatgtccatacatagagaaatggataaacaaaatgaatacatgcatatatggaagccaggcacagtggctcatgcctgtaatcccaacactttgggaggccaaggtggtagaatcacttgaggccaggaccagcctgagcaacagcaagaccctgctctacaaaaaaaaaaaaaaaaaaaatgaaatggaatattattcagccttaaaaaggaagaaaattctgagacatgcaccaacatgtatcagccttgaggacattatgctaaatgaaataaaccagtcacaaaaagacaaatactgtataattccatttatgtgaggtacctggagtagtcaaattaatagagacaaagtagaagggtgattgccagaggctgaagtgagagggaaaaggggaattgttgaccaatgggtatagagtttcatttttgccagatgaagagttctggagattggttgcatggtagtgtaagcgtactttactgaacaacacacttgaaaattgttatgatggtaaattttatgttatgtgtattttaccacaattaaaaacaaaaaagtgaaataaaaaatgatagatgaaataaagagaacagtaaagcccaatgaccttaagctctatctagttcagtccagtcccttctttttgcttataaggataatatgacattgtttgaatatagatctctggccagagttctttcttctacattgtggcaacactcatgatgattatatatattctataagctctaccttaagcatttttatttgttttcagcatatgttattattacataaatatttataacacagatctttggtaagcagtaccaaagttaaattcataaaactcagaaactggaacatgtaggtttagagtaaaaggacaggacgggcacattgtaaaaggaacagctgagatataatgggctgtcagtcattattaccccaatacaggacaagccttcaaatgtgcaagaaatgatcttattctttcaatatcttgtcattttaaaaatcctacagcaaaaagatctgaaaacctaggtaaagcaaataagcgggaaaaatgtttgtaacatgtatgaagacttgctaaccaataatgaaaatgacatatccctagaaatgggccaaattcataaataagcacccactaacaaaaaactacaaatggcctttaagtctatgagaatacttaattttattcataaagagaaattaaaaatgagacatcatatttcactcatcagattagcaaacacaaaacaacttggcaaaagcatggaaaaaccagcattattgctgggaatggaaatcattcaacttctctatcaactgttatcaaaagtgaaaatgcaggcccgggtgtggtggctcatgcctgtaattccagcactttgggaggctgaagtgggcagatcacttcaggtcaggagttcgagaccagtctggccaatatggtgaaaccccgtctccactaaaaatacaaaaattagctgggtgtggtagagtgtgcctgtaatcccagctacttgggaggctgaggcaggagaatcgctcgaacctgggaggcagaggttgcagtgagccaagattgcgccactgcactccagcctgggcaacagagcgagactccatctcaaaaaaaaaagtgaaaatgcacgtgccttcttatccaatagttccatttccaggaatgtgcacaaaggtatatgtaaaagaacattcactgcaggcatttttgggtgggagggtggcaaaaggttggaaaccacctgcctatccatcaataggaaattagttaaataaattatagtatatctatacaatgaattactgtgtaaccagtaaaaagaatgaagtagagctatacttattaatatgttaaaaataaagtggaggccaggcatggtggcttcatgcctataatcccagcactttgagaggctaaggtgggaggatcacttgagcccaggagtctgaaagcagcctgggcaatgtagggagacacaatctctacagaaaattaaaaagttagccaggcgtggcggtatccgcctgtggtcccaactactcagggggctgagatgggaggatccctggagcctgggaggtcgaggctgcggtgagctgtgattgtgccactgcactccaatctgggcaacacagcaagaccctggctcaaaaaaaaaagtggacaagactatattccacttttgggatatatattgagcatcagtgccaggctttgttctaggcactgggcataaagcagtgaccaaagtagacactactcccaatcctctatgagctttcatttcagaggaggagtttcacatatgcatgtatctacacagaatacatctggaagaatatgcagtcatctgatgacattaagtgttcctgggaaggaggcctcagggtcaaggatgagaagatttcttttcactctaacattttgtaccatttgaaagttttataaggcatgtattaatttttccaaaattaaaattttaaattacaaaaattgcatgtagcagaacagagaagaaaatttttaaagcaggcaggaggatgggcagcctgataggctgtaccttgcatccttagttaggttcttgctccgtgttgctgcttgaaggctatacagaaagaatctttgcctccttaccctatttagagccactgctgactccaccggtttgaaatagtaaagattaattttccacaatgagatattggcattgctcccaaatatttcatggaagtggcatgccttctttgaggcagttgtcttagtcattaagagttctttccagcaaaatcggggcatcagtgccccacactggattggcgggtggtgggggggtgtcagtgctttgagtcagacccagtcaggcttaaaactcctaaagagacaatttccagataacttcagctttatttttaatgctttttgccaataatttgatcccatcagaacagctcccatggtaccataattcatatatcctgtttttatttgtataggaacctaggagaaagagaaggaaaattgaaaataaattaagtcaaatgcaatacttgtgctaaaaatgttgtcaaaagttgaggccacttctaggcaaaatgttggaggcagagtttgcctttcagtctctttctcattttcaaagttttcctttctgtcttgcgttgtgtcttcagatgcctccacattctgcctaccactagagcacccactctcctatctgcctagagcacacacatctgtcatcatcaggtgctcatccagggttcaccgccatcaggcaaaggaccacttagcttatctttttcataaactaatttatgcttagatatgaatgactacccaggctgcctaagctcttaataaatcagaaacttgctgcagagatatagaagtttgatgtgaaacaagttcatattcaattggaggtatctctaacaaacattaaagtgattaatctcactagtaataccaccagcaccctcattttacagagtaagaaactgaggcccaaaaaaagtgttaattggaccatagttaatactgaccttgcctgcgttacattaggcattgtaatccaataccttggattacattattttaaaagttgcagtgtagaccttaagtaactgtttaacaaacaacctcttgattaaataagcatttaaaagtaagttgttattaagacctaacattagctataactttattttaggtagtacttgaagaagtctttcttctgcaaaatatccttgtctcatgtcacagaacaaccctgcatgtcttgaaatgcatgtgacttgttagtgcttaaataacaatacatgcggtatgtatatattctttaccttaattcctacttctttgatctgcttctctaaatataagtaattccgtagcaaatgcatattttcctcatttttatactttagttttttttaaaaaaaaaaaaaaaacaagaaaaagaggtaattggcaatatatcctttttttttttttttttttttgagatggagtcttgctctgtcacccagattggagcgcagtggtgtgattgatcttggctcactgcagcctctgcctcccgggttcaagctattctcctgcctcagcctccgaggagctgggattacaggcacacgccaccatgcctggctaatttttgtatttttagtagagatggggtttcgccatgttggccaggctggtctcgaactcctggccagccaggctgatctcgccctcctggccaggcgcagtggtataagccaaataagaattgcttgaacctgggaggcagaggttacagtgagccgagatcgcgccattgcactctagcctgggtgacagaggaagattcttgtctaaaaaaaaaaagtggtataagccactgcgcccggccaatattttctatgtttatagcaaaattgttcaaaaactgcatatgtacctacaatattttttcttaagaaattcaagttttgggctgggcacagtggcgtatagctgtaatcctagcactttgggaggccgaggtgggtggmtcacctgaggctaggagttcaagaccagcctggccaacatagtgaaaccccgtatctactaaaaatacaaaaaatagctgggtgtggtggcttgtgcctgtaatcccagctacttgggaggctgaaacacaagaatcacttgaactcgggaggtggaggttgcagtgagccaagatcgcgacactgcactacagcctgggcaacagaacagattctgtctcaaaaaaaaaaaaaaacgaaaagaaaagaaatttgaatttgtgttttgagtttgccttgaattattgtcaggagacaataattctgtcataaggagataactggaaaaaataggaatgggttttataaaacaatcattgactcaatctctagctcttctactctaaagtcaggtaatatgtggtgcattaggttaggacttttatgttagtcatatgatgcatgggtagatctttctatgttttctctttgaaaactactaatctgctactccttttggctataactcacaaactcttttctcttcagactatataaagactttagctagaatgcttcacttttttattaaagaaattgctgtttccttccaaggacaaacattttaaaaataaatgatatgggtcattcattcggcaaatattggactgcctgtagtagattaggcactgtgtaggacactggcaatatactgrtgacacaagctacccgctgccccttagcaagtcatttttgcaagtcacttttatgacatatttatctgaaatagcccatcacttattaaaatcacctgtgacatcatggcctggcacggtgactcacgcctgtaatcccagcactttgggaggccaaggtgggtggatcctttgaggtcaggagtttgagaccagcctggccaacatggtgaaaccccatctctattaataaagtataaaaaattagccaggattggtggcaggcacctgtaatcccagctgctcgggaggctgaggcaggagaattgcttgaacctgggaggcagaggttacagtgagccgagatcgtgccattgcactccagcctgggtgacagaggaagattcttgtctaaaaaaaaaaaaaaaatctgtgacatcagctaataggttaacttaattaaagagagcaattctggccaggcacagtggctcacatctgtaatcctagcacttagggaggccaaggcaagcggatcacctgaggtcaggagttcaagactagcctggccaacatagtgaaaccccatctctactaataatgcaatgcctggtgtgcacctgtaatcccaggtactcaggaggctgaggtaggagaatggcttgaacccaagaggcagaggctgcagtaagcggagattgcaccactgcactccagcctgggaaacagagtgagacgccgtctcaaaaaaaataaataaaaataaaaataggtattcaacttattgcttaaaaatgtatacaatttctttgtaaaattgttactgaatttttattttaattctttttttttttaatagagacagggtctcactatgttgcccagtttggtctcaaactcctgggctcaagtgatcctcctgtctcggtctcccagagtgctagaattacacgtgtgagccactgtgcccagcctgttactggatttttctatcattgcacttattttttaatgtctataaaaaatttgaaagacaaatatattaatacttatgttttatttatgcttccaaataactacacaaaatcactttctaaaagatgactcatctatgctttgcaatttttctgcccatgcatttcttctctgtgccacctctcttctgtgttgatgataggagagtacagttgtctctcagtacctgttagagattggttccaagaccttctcatggattccaaaatccacagaagctcaagcccctgatacaaaatggcatcacatttgcacataacctctggacatcttccggtgtactttaaattatctctagattacttataatatctaatacaatgtaaatgttatgtaaaagattgttatattgtattggttagggaataatgacaagacaaaagtctgtacatgtttattacagacacaactatcctttttttgtatgaatattttcaagccgagactggttgaatccacagatgcagaacccacagatatagagggtcatatccatgcattaataaaaagtttatgatttttacttaaattaatcaagaaatagtggtcccataggtcctttgaattgacttggtttggaaacatatggaaaaaatattcctaaaaaagtatttataaaaaaaagagaaaaaaaaacaaaaaagaaaactattgaaaagccgaaaaaagttataaaagatgagaaaaaattaaaaattgtgagtattcagatagcaattcttatcaacatgaaataatataatatggttatggcagttcatgaatagatatttgaactatatctttacataagttaaactgttaaaatttatacccttagcagaaggcaagattccaccggatgctacattgatttttgagattgaactttatgctgtgaccaaaggaccacggagcattgagacatttaaacaaatagacatggacaatgacaggcagctctctaaagccgaggtaattcaaaccaatttcatgtgtatagtctaatttttttatcacagtttaaatacatctgtgttacaactattactttttaggtctagctagcatgggctstgatcactgcttttatagagctggtcactaaaaaataatctaagcgcttagaaaaagctctaagctttttcagtataaaccttgtgagtcatcctgttcaattgcctttctccctgcaagagagtcattaaaatcccgaattatttgtctctacagtgctcttccagtttctagattacactagcatatctctttttcagacagcactgtaagaatttgcaacagggcaaataattcacgcctcataggatgatgaaaagagctagcaagggtctgaattgagtgggctagaaagttggtaaacaggagccagaagttcagccagctagcgtctgtatctcagccttgtaataaagatcttgtaataataatgataattgggctgggcatgtggctcatgcctataatctcaacactttgagaggccgaggtgggaggattgcttgagcccaggagttcaagaccagcctgggcaacacagggagacccccgtctctacaaaagatttaataaattagccaggcatggtggtgcatacctgtggtcccagctactcaggaggctgagaggtaggaggatcgcttgagcccaggaggttggggctgcagtgagctgtgatcatgccactgcactccagcctggaagatagactgagaccttgcctccaaaaaaaaaaaaaagataataatagataacatttattttatacttttagtaccaggtactatttataagcacataagtatgtgaacttatgtaatcttcatgatagtttatggggcagacactattgtcatcatcttcgcttttagatggggaaaataataatcaggttaatcagccaaaaatcacacagtagtaaggggcaaaacctgggcaatctggcttcatgactgttcttacatttcaattttttaaatttttcttagagacagggtctttctctgttgcccatgccagggtgcagtgaagtgatcatagctcactgcacccttaaacccctgggctcaagcgatccccgcagcatgccaccatacccagctaattttttttttttttttaagagatggagtctcactacattgcccaggctagtcttgaactcctggcctcaagtgattctccttcttcagcctcccaaagtgctgggattacaggtgtgaaccatcatgcccagcccactactatatttttaactttgggcctagactgcttctttcagagaaaatcatgaatgtttcaagtctaatactatttattgaattctaatgtcttacttagtcccactgacgatactcctgcttaaaattagtaaaccagctgtctcccctcttaactagttaggagacatttaaaaatgtgtaactctaccacataagtaagtagtaaaagctaactaggttgatttcaagtaataaaaataagtctttttctctgtttctttttcatctccctctccaatcctttccccacccagttcaacttcttacaccaggatattagtaatgactttcccttcaggcatcttggttggccaacagtggaagaaggagaagggaacatgtcctgttcttaagaagaagggcagttaccggggtggcaaatggttcccaaagtgtacttctctattgactccttatcacccttttttagagtgaatagcagctgcagatgaattcgcatagtacccaagagctcagcctatgcacacagaccactcattatcacaggcacaccaagagccacgttctgcagtatgaatactcctcagtaagacattagatgatcttaagttcttttctggaaaataaaaatagagaaaatccaaaatagtaatctacttatctacaatttccccagatgtctatgtgatatcagctgctttattgccagatggatgagagtgattttcactaacttgaataacaatagctgtcttttattgatggccataatcattattctaatcctcatatcaatcctacaatatagatacttacttatctccttttacagatgacaaaactgaggttcagagaggttaatttgcagaagaccacacagcaaatccaagacaaagcctgaagtagaaacacgaactaaaaaaacaaaaacaaaaacaaacaaacaaaaaactttattcattgtcagaaagattaagtaaactatttcatcagtgtacaggaaggaacatttaaaaaagaaaaagaaaaactttctttaatattaataaagacggaaaggacgggggaaatacagtattttattaaattaaaaagtggaaatagtgtggaacccattactagcaaaattaaggtcatgttcttacccactgtctttttgtacctctgtactgtagtttactggaaaaggagtcaagtttaagcatcagcaatwttggttatgtaaaaataatttgacttacttagaaactgagaaatatttgaaggtattaaaaattgtttacccctacataggattgctaagctttggctggaagaaaaaaatgtgtctgcctcatgtaggaccaaagtcccatttgagaacagttgatgtatccttcattaaggtccactgattgctctaaaataaagtcaacttgcaatgggttgaccctgggatatgtattgctaaaaacctctcaaactctagctttcaaaaatactcttgcctctataatgccagccttactgaacattacctccagatgattgtgcattgctttctttagttattataaggattagtgctttcmaaaggaaatacaattgttacacatataattttaaaatttttatagtcacatcttaaaaagtaaaaagatacaggtgaaattaattttaatgttatatcttcactcaatatatctataatattgccatttcaatatgagatcgatgtaaaattatcaatgagataactttttgaagtcttcaaaatctgttatatattttatatttatagtaacatatctcattttgatctagccatgtttcaagtgctcattagtcacatgtggctagtggctactatattggacaatacttttaatgtgtgtttgcatatagaaattttatataattagtgaatacttcaggattctttatttgacattattaaagagattattatagttatgtagacttggaggagagctatagaagcatagaaaaacttaaaatactaaattttatttcaaaccccatggttgtgttttattgattatacaacatattcattagttttagagattatagaaatgccaattgggtttctttcactaatggcagtcatgcgtgattttcctttgataataggaacagcatggattattagaaagcatttagtttcaacaaaattcmgtttaaatattaatcttcgagtatgtaccactaaccatctatcatcttagggaaaactaatttgaagacctgtttctctccaaaacattgcttcaaagaataagaaaaataaaacctcaaatagcttttcatactgttgtatcatttactgtaagtaatcttgcacatgagtttcattattataactattccttaaagttactggaaatycactgtgataccttttaattaaaggaatgttattttggccttccagataaacctctacttgcaaagggaatttgaaaaagatgagaagccacgtgacaagtcatatcaggatgcagttttagaagatatttttaagaagaatgaccatgatggtgatggcttcatttctcccaaggaatacaatgtataccaacacgatgaactatagcatatttgtatttctactttttttttttagctatttactgtactttatgtataaaacaaagtcacttttctccaagttgtatttgctatttttcccctatgagaagatattttgatctccccaatacattgattttggtataataaatgtgaggctgttttgcaaacttaacttgcaggaatggtatgactgtgtttcctactgctttattctgtaaacaagaattgtagcaccatgaaacagacctctgggtcccagtgggcattttttcccctttcaggatgtaggaggacatgtatagtatgtcaaaaactgcaagcttttcccaactttaaccttaccagcatgttaatatccagtttttttatagtttaaaagttaaagtgcctcatattttgaaaatatccattaaggacccaggaattagcatttcacttgtttatacatttttataacattatgaagacgatataaaaatcctagaactgaagagtcttcctttggtatatgtgcaggaagatagttgtatatctctgttccacaaagaacgcaacacagtctctaaactttttggtgtaagcttctagccttgggtattttccagtggggaatgtttaaaaatatttgaccaaaccaaagactttttgcctcttatagcaagcataaagactgtactgcctggcttttgtattccttcagacattattgtaaatgtgcaactcctcttccctcttgtaaacctttataagatgtctgccaccccaagcttttgtcttgatagttttaaattgatgccatgaaatttcttagttttcgttccctttctctagttatctctttccttatgtcacctcatttcccatcattcttgtcactaatgatgaatgatcattacaaattggtatgctgtcaaattttgataaatgtgccaaacaaaggaggatatacagtgccatggcaattttgtgtcatggtcaagttatgatatcatatgacttgagaatagtatgtaagagatgctgtagaagatcacgttggtaccaaagaaagggcacatgtctatcggaacatagattttgcatactgcatggtatggtcaggctttgtgtccacacccaaatctcatcttgaaattataatccccataatttccataatccccacatgtcaatggagagaccaggtggaggtaactgaatcatgggggtggttttccccgtgctgttctcatgcaatctgatggttttataagtgtttggtagttcctcttgcattcattctcccacccgccaccttgtgaagaaagtccttgcttccccgccttccaccatgattgtaagcttcctgaggcctccccagccatggggaaccatgagtcaatttaacctctttcctttacaaattacccagtctggggcagttctttatagcagtgtgaaaatggactactacactgcatatataggaaagtatggtcagacagtaaatagctctgttcaaaataattgagttccaaacaagtaaagttttttctaccttctgaaacttgctctttccaaaccattgttcatcctttaacttctttacactatcaaaaattctatttaaaaatagagggctttcagatgagtacatacaaaaacaaacaaaagtatacataggggtaacacaaccatgagattagtaaataatacatatggctagcacataatttgacaccttataaaacaagaatctgtactatcttttccttcctcccaatatttcttcatttctatgctcaattttctaatactttttcacatgcttaatcatttactctttcatcgccttccctcaaaaaaacctgctccgttgaagtaaactaagtaactcaatattctttattttggtttggaacctgtctcaattttttgtatccatattaagaagtcaccctataatctaaactttgtaattctaatttttttgtcccattatcatacaaagtgcttttaaacttgtttttaaaaaatgacagataatgccacatgaataggaagatgattcattctaaaacttgtatttacataattaaaaataaatttataatcattctacatacaatacagtgtacaagtatttcatatatctgcatgattgccttatgccttcatatgcatatatgtggcattgagtgctgtgactacattttgagttctagaatttttttttttttttttttttgcaggtgcaagatttaatagagtgaaatagagtgaaaacagagctcccatacaaggaggcgacccaaagggggttgccattgctggctggaatgcctggatttatatcctgatccttgtccctcccgctgtgctctcaggcaatagatgattggctatttctttacctcctgtttttgcctaattagcattttagtgagctctctgattggttgggtgtgagctaagttgcaagccccatgtttaaagatggatgtagttaccttcccagctaggcttagggattcttagtcggcctaggaaatccagctagtcctctcagtccccactctcaacaggaaaacccaagtgctattggggaggttggccgatgactgctctaactgcttcctgctgaactggggcataggaggggttgtgcagctgagatttccttgggaggggtgccttcgatgtcattaacaccagagcatgggctgggagaccggtccgggggtctacggtggatcttagtcatggactgcatctggggctccatttgatgaaccatttgtagttttacagtttcaattcaccttggaggtcccttcgtggtcgccaaagtgttaccgggggtccttgctcccagagctcccaagaaggtggtgggcgacttccaaaatggcggcaggccacttccaagatggtggcaagccccgtgttctctgacctggggttgttggcctcacggattccaaggaatggaatcttgggccatgcagtgagtgttacagctctattagaagtcatgggtcacagaaaagaaccgtggaacccagtgactagtgttcagctcaattaggacgaacccaggcacttagccgtgcaggaacaatggcaagcctttagcctgatcaggagcggcaatgggcgcctcactggatcaggagcacagcggacaccctgccagattcagagggatgggagtcagcagcgggtctgtgacggtggcaaacagcagtggtggacggcgagcaaaagctcagctcgagccttaacaaacatggaccagaagagtgcagttgcaagatttaagacagtgaaataaagtgaaaacagagctcccattcaaggagggacccaaagggggttgccttgagttctagaattttaacattttattcattttataattattttaataaaggtaaatagtaatttaggttgtttgtgtatgaaaaattcagatttctcagcagagtagattaaaaagatctttcagaattgaatatgttaaatgttttaaacattttcaaagaaacagatgtgtcttacctgtcttaacttcacaatgaccgtattgcgttttatgaagacaaaactcgtgagcatatccacatcatagaatggcagcccattactactatcagtcaccttgttaactgtgtacacaaaaccccatgttgagttcagtgtgcttttaatttgatactgcaattaaacatttaagattgcattaaattattaacacatttttctcattttaccagaccaaaggcaatagttgaaacaccaaaagttgctacttgtgcagtcttgtcatccttacatattgaactgaaagttgattgaaaataaaattggtatttacaaaaatctcttaattatataaaaagttatctaggccaggcacggtggcccatgcctgtaatcccagcactttgggaggccgaggaaagtggatcacaaggtcaggagttcaagatcagcctggccaagatggtaaaactctgtctctactaaaaatacaaaaaattagccaggcgtggtggcaggcgccagtaatcccagctactcgggaggctgaggcagagaattgcttgaacccaggaggcagaggttgcagtgagctgagatcatgccactgtactccagcctgggtgacggagcaaggctctgtctcaaaaaaaaaaaaaaaaaaggtgaactaaaatgatagactacatcccaaaaatgattctaaagtgactggcatgattcataatctctgaattttatatgtaaatcttttttgatataaacaatgttattaattttcatgacaacttaagaaatagacactactgttataattgctactttatagatagggaatatgatacccagacaggttaatttctttttgcttttctcattttaatttaattcatcaaagcaaacctagataatttagggaaggtttgtggcacaactgcacctaaaacaccaacacggtgtattcatttttcattttatttcatcctcttgtgccaaatatcaaaacaaggaactgcatgaagtctcacatacttctgaccatcaacagaacactgaaagcacccataaactgtctcccttttgaagttccccattccacagagtatgcaaggccctttgggaatgttgtgattaagtaagttaactcggatatgggtcccttctttgagtgaaatatcagtcatgctgagaggtttgtcatagtagtcagaaaaaagatcatccaagtaaagctgtgaacgagaaatgacatccatcactcttctatctaaaaggacaaaaacagaaaagaaatgtgttagaagtgaaaatgaaaaatacataatgcaaacagcattaataaatatgtgaatccactagtcatgaaataatttggcttttttttttttttttttttttttgagacagggtctggctctgtcacccaagctggagggcagtggcacaatctccacttactacaacctccgcctcccacgctcaagtgatcctcctacctcagcctctcaagtagctgggactacaggtgcacaccactgcaaccaactaattttttttcttttgtattctttgtacagatggggttttctcacattgcccaagtgtttcaaacttctgagtgctagcaatctgcctgccctggcctcccaaagtgctgggattataggcatgagccaccataccagccaggcttttaaatttaaatttttccttaacagatgagattactgaatagaaaacctcatgtgttaagccaggaaagaaaaaaaaaagacattcacagtactcttcaataaacatacttctttcaaataggatatttctcaacctgtacagcagtgcaaatgttgccgtttcttccctttcaaatcctccttttgacactgaagtgacacaaaggtctacaaaaaaaattgttagaagatgttataacttgaataattcatattttattgtttgatggggtgatgaattctagtacaaatcattcattgtattgtttttaaaagttgacttttacatacttttggaaaaggtaacattcacatggtacaaaattcatacagaaaggagatacagtgacaaataggtctctggcccaccctgtatccagccacagtcttctacctcaggggcttaggggcacccgtggtttaagtttcttatgtttgcttccagaaatactccatatattttataagcataaagaaagatgcatatatacatgtatgtgtataaaattatttatgcccaaatagttacatattatactcagctcttgaaaaatatctattaaaagtattatattcttattggcttcatagtattctcttgcaaggatgcaccattatttagtctccttaatgttgtttccaatctcttgttattgaggactgaatatacttgcactcatatcatttcatatatgtgtaaatatatctgtaggataaattcctagaagtggaagtccaaattatatatatattttaaattcttgtggatatatcagtccatttacattcctcccaaccatcaataaaactgtaaaaacctaaagttatccaattagaatttacttaataagacctagtatttggaagcataatagggtgactacagtcaaaataatgtaattgtacagttttttctccatcttagactgagaatttgtacatttttaaataactaaaagagtataattggattgtttgtaacacaaaggataaatgcttgaggggatggataccccattttccatgatgtgattattatgcactgtatgcccgtatcaaaatacctcatgtatcccatacataaatatatatataatctactatatagccacaaaaattaaaaatattttttaaaaagacaatttacttaacatgtagttttgttttgtttctggactccctattccctcctcctacaaaattgcagaaatgaacaagaacaggtctaaaaacatttgtaaattaccatggctaggggctgcctttcctgatcccttgggctacacctggacttgttccagttggccaacagaccttaaagacctgtgaaatgtagagacctaaagtgagctgcacttaggtattatacaaggtgacaattttggaggaagtattttcactttttaaagttattttttaggaagagtgcaaggggaagctgggtctatgataagtaaaactgaagtaagaaaagctgtctttagaggccctggtttgggcatcctaacacttcaggcatcctactatctacctactcctctgtttgccaccatcaaaaactacctataagaaggtcatttattatctccccatgtaagctaaggaatactttgtcagtagatggcattttagctcttatttataattttaaatggggtagtggagagtttacaaccttcaccaagaagcagaaaagtggaatggggaagcagcgaacggagggtctttctcagctattttgccaaagcataagattgacagtgctgagagcatcttctataattgttagacacgagaaatgagagaaaagagagagagagagcacatgccctaatgaatgctccttaaaaatataatcatttgtatttcatgcagacccttaactcaccaaaggcaccatccaggtatatgaagagttcaaaaacactgaaagctatggttgtatgtgctgggaaaacaatagctttgtcccttcccttgggattctgttcatccataaagtgaaactatattgaataaataaataacataattaaggatcataacatgtaaggatagctttttggagaaatgaaacatttcctataatcctaccaaaaacaaaacaaaaaattcccaagtaaaggattattctgcttgaattaaaccattttttatagcagagatccaattggtccaacagaaactcctggtctatattaggaaatacctctgcacttttcacttactttggtattacagcccatgattagtgctaccacaaccataatgctctggagcagaagccttttttttttttttaacaggaaatcttagaaagcagtgccagagttaaagttttcagcctagcctgtctaccattccaaagccctccagagcttttagtagctttctaaagcaatcgctaacaatcaagtaaatgtttcagtttgtgcctcaaaaatgatccaatgttaatcagaatttgacaggcagctgaatatgcgaaaataacttttatttgcaaagacttgaaaagattatccttgaaccctatctttctaacaattggttttaatccaatcaagtcattattaggtgtcactgaatgacaaagataaacaatatcataattgagctgaaaattaaacacagatacttttccaatttttttttcagagacagggtctctctctgtcacccaggctggagagcagtggcacaatcatagcctactgtaaccttgaactcctggccactcctgcatcctaaggtgtccccgccaagtcctgagctcgaacctgcaaactgctggttggacgcgaagcccatggtcgtcagctgagcccgtggccccgggcccctagttgga

SEQ ID NO: 96139 - DNA, 15877 bp, Homo sapiens
  misc_feature (1)...(15877): n = A,T,C or G
cccccagcagagctagaagaaaccagttcccagaatacctggtactcctgttgagccatccatcatgtggggagggaaactgaggctgggagagacagccctggataccaggacttactccacccctccccaggacattgctctgacttgaggaccatcaaccacttcaccctctgagtctcagcctactcctgtttgtttgtttgtttgtttgtttgtttgttttgagacagggtcttgctctgttgcccaggctggagtgcagcagtgcaatctcagctcactgcaacctccatcccccaggctcaagcaatcttcccacctcagcctcctgagcagctggaactactagcgtatgacaccacgccaggctaattttaagctttttgtagaggcaaggtcttgctgtgttacccgggctggtcttgaactcctggggttgccccgatgtagtcaggtacccaagcaatcctctggcttaacctcccaaagtactgggattataggagtgagccaccacatgcagctccattcctctgtaaaatgaggataattataatacccatccctggggtggctgagaagatgaaatgactttgggcacataaagtgcttagtacaatgcctggcacctgataagagctcaacaacaggttgaattgtattatattgttaagtcttactcccttggaacacagagccctaggtagtagccaggtgggactccctgcgggggacccgagagagaagctgcttccaaaattcccctgtgaggttccccgggagtggcgctgggctgctgggaatttactcttctcaaacctgtcatatcttcacctcgtctgagctgggaacatgagctgtgctgcaggcattagccccacccctattaaaaaggggaggtttggcaggcgcggtggctcatgcctgtaatcccagcacttaggaggccgaggtgggcagatcacctgaggtcaggagtttgagaccagcctggccaacatgacaaaaacctgtctccactaaaagtacaaaaattagccaggcatggtagcaggtgcctgtaatcccagctactcaggaggctgaggcaggagaattgcttgaactcgggaggcggaggttgcagtgagctgagatcgcgccattgcactgcagcctgggcggcgagactccgtctcaaaaaaaaaaaaaaaaaggtttatttacatgtacagaggacccactatgtgccaggcactgggtatacaaagcccaaaatgatgtggttctttttctttttcttttttttttcttttttaatgaaaaaaaggctgttacacaggctggagtgcagtgatgcgatcatggctcactgaagccttgatctcccaggctcaagtgatcttctcacctcagtctcccaagtagctgggactacaaacaagtgccaccatgcccggctaatttttttttttaagagatggcgtttcactatgttgcccaggctggtctcaaacaaatgggctcaagcaatttgcctgcttcagcctccaaaagtgttgggattatacacatgagcaactgtgctgggtatgacgtgagtgttgttttcaacttgcttgtgatctagcagtaaagactgacagaaggccgcgcgcagtggctcacacctgtaatcccagcactttgggaggccgaggcaggtgaatcatgaggtccagagttcgagaccaacctggccaatatggtgacagagtgagactccatctcaaaaaaaaaaaaaagattttttgattagccaggcatggtggcacacacctgcagtcccagctacttgggaggttgaagcaggaggattgcttgaacacgggaggcagaggttgcagtgagctgagattgagccactgtactccagcctgggcaacagagcgagaccctgtgtcaaaaaaaaatttttttggttatatttgctagaaagggttgctttttaatttgtgactttttactttttattatgggaatttttaaacatatgcaaaagtagagatgatagcacagtgagttccctgtacccagattccacaaccctcaactttttgctattcttatttcatctatatcctcacctataattttttttttttttgagatggagttttgctcttgtctcccaggctggagtgcagtggcgcgatctcggcccactgcaacctctgcctcctgggttcaagcaattatcctgcctcagcctcctgaatagctgggataataggcgtctgccaccacgcccggctaattttttgtattttcagtagagatgggatttcaccatgttggccaagctagtcttgaactcctgacctcaggcgatccgcccacctcggcctcccaaagtgctgagattacaggcataagccaccgcacccgcctcataaatttttttttctggagacttttaaggcaaattctggacatcatgccatttcacctgtacatgcatcgagatggatctcaacagataagaactgtttaaaagcatagccactatatcattatcacatctcacaaaattaacaataattccttaatatcatcaaatacccagcctgttcaatttgccrgaaagggttttggtagacgttgcagaggctgctctggaatgggaatgctgagtgagtgccttcccctctgattgagactgagggagctgattatgcttatgctataggcagaccaaactgagtttgagcctggagatggaactctccgacagaacttgattcccgcagtccagagaagctacttcccacctgtcaactctgggaggggcaggagctactgggaatgggacgcccaggctccatactgaggcccccgatgcctgagcctactctatccccgtctaccctcccaggcccaccttgtgaactcctcgtgcccagggctgatgtgcgtcttccagggctactcatccaaaggcctaatccaacgttctgtcttcaatctgcaaatctatggggtcctggggctcttctggacccttaactgggtactggccctgggccaatgcgtcctcgctggagcctttgcctccttctactgggccttccacaagccccaggacatccctaccttccccttaatctctgccttcatccgcacactccggtaaggatggggcaggggcctggtcattgtaggcacgsgggccccaggggtcctggagctgtctctgactgcataacaccctctgcagttaccacactgggtcattggcatttggagccctcatcctgacccttgtgcagatagcycgggtcatcttggagtatattgaccacaagctcagaggtgagtctggagtcggagtaggagtcaggagctggggaaggccattagggaggggcagtgaccaaacatgagccttcctcgctcccaggagtgcagaaccctgtagcccgctgcatcatgtgctgtttcaagtgctgcctctggtgtctggaaaaatttatcaagttcctaaaccgcaatgcatacatcatggtgagctacactgcaagcaaccctttgttctggtgccctttggtctagacaccyccatcctggtccaggcagctcgccttggtaactctgacctttccacctccctcagatcgccatctacgggaagaatttctgtgtctcagccaaaaatgcgttcatgctactcatgcgaaacattgtcaggttaggctgctccccccccgctttgtggctccctcctctgatctcccacccaaggctggcttcgtgggtgtgctgtgctcagtcgggccctagacttagtttagtgctctgctcttgccatcttgaaacgtgaacaattttcattttgcaccagtccccacaaattacgaagccaatttcactctcagcattgccaggcctctcaccctcaacctgccctaacttctggcacagggtggtcgtcctggacaaagtcacagacctgctgctgttctttgggaagctgctggtggtcggaggcgtgggtaagggaccagaagctgtggggacagagggtaggggtgctgggcagctgaagaggtggcctcagaggtgcagcactaacccccagaattattccacaggggtcctgtccttcttttttttctccggtcgcatcccggggctgggtaaagactttaagagcccccacctcaactattactggctgcccatcatggtgagtgactcccctctctgctgctccacccccaactccccagaggaacccaataaccccaacgggtcatgtcttccagacctccatcctgggggcctatgtcatcgccagcggcttcttcagcgttttcggcatgtgtgtggacacgctcttcctctgcttccgtgagtgacacccccagccacctgtccccaaccttaaagtactgagccgttcaagcatttttttttttttttggagatttggtgcttctagaaacaatgcctttgtgagctaaacgaaccagagggagcttcttgtgacatcctgaggccaggcgtttagggaagaaggaagagagtgagcccccaggccggtaggctctccaaagaaggagcattctgatggagaggtctctgctatcttccctaagaaatctcgggtagaagttagccattagaggccaggcatggtggctcacgcctgtcatgccagcactttgggggaccgaggtgggcagatcaccctgaggtcaggagttcgagaccagcctggcccacatggtgaaacccctctctactaaaaatacaaaaaattagctgggcgcggtggcgggcgcctgtaatcccagccacttgggaggctgaagcaggagaatcgcttgaactcaggaggcggaggttgcagcgagccgagattgcgctactgcacttcagcttgggcgacagcaagactccgtctcaaaacaaagaaaaaagattaaaaaaaaaaaagagccattagagagacttcccagcaggtggctgtagcggcaggggattttcttactctacagcatgcatccattcagggtttgccagtctcctcctaagcgactgacatgcattttttccgctaattcttatcatcgctctatgcaacataatattcccgaccccacttcacaggaggaaactgagattacataacctgcccgggggtaagggtggtggtgcagcttggattccaaatcccgcaggcagcttgcctcccagtccccgatttcctggccccagggtccgctctaaccggtctctgttgcggctcagtggaagacctggagcggaacaacggctccctggaccggccctactacatgtccaagagccttctaaagattctgggcaagaagaacgaggcgcccccggacaacaagaagaggaagaagtgacagctccggccctgatccaggactgcaccccacccccaccgtccagccatccaacctcacttcgccttacaggtctccattttgtggtaaaaaaaggttttaggccaggcgccgtggctcacgcctgtaatccaacactttgagaggctgaggcgggcggatcacctgagtcaggagttcgagaccagcctggccaacatggtgaaacctccgtctctattaaaaatacaaaaattagccgagagtggtggcatgcacctgtcatcccagctactcgggaggctgaggcaggagaatcgcttgaacccgggaggcagaggttgcagtgagccgagatcgcgccactgcactccaacctgggtgacagactctgtctccaaaacaaaacaaacaaacaaaaagattttattaaagatattttgttaactcagtaaatctgtgactcattctctccacgacgacaggcggcctttttttttccgckcccggctctttaaaatcggccccgcccctgtgacgtgkcctggtgccgcggccaatcaaaaagcccaataaggatggtgccagtcccttcttcaccccagccagtccgcttcccgttcgggtcacgcgctccgggcctccaagagggcctccaagagggccaatcggaagggcaagcttcgagatgctgcgtgatcacgtgggaggagatgagctacttgaagaccaattagagtccgggaagcgcggcggggcctccagaccggggcgggcttaagggtgacatctgcgctttaaagggtccgggtcagctgactcccgactctgkggagtctagctgccagggtcgcggcagctgcggggagagatgactggggagcgacccagcacggcgctcccggacagacgctgggggccgcggattctgggcttctggggaggctgtagggtttgrgtgtttgccgcgatcttcctgctgctgtctctggcagcctcctggtccaaggctgagaacgacttcggtctggtgagtcaccctttgcatagccccatccccgacccgcgcaggtgatcgacacctagtgtcccccggaacgckggcggctgagccgactttccgcgacaggacccttttctttctcccagaccccgtttcctcctaccgctcccagcccctctccctctccgggtccccgtccttctcctcattcgagccccttcctcttttggggtccccttccctccctgaaggcgccttctcctttcgtagaccctcccctgctccgagcctccagcttcgctccaaactccccttcgtgttcctctttcttgttctgggaccccatcccctactcgggatccccattagatcctccctctcccatcggaacgtgggttcctaaaacccccaagacaagtttgtctttgttgacccttcctcctcccatgacaggtgcagccgctggtgaccatggagcaactgctgtgggtgagcgkgagacagatcggctcagtggacaccttccgcatcccgctcatcacagccactccgcgggscactcttckcgcctttgctgaggcgaggaaaatgtcctcatccgatgagggggccaagttcatcgccctgcggaggtccatggaccagggtataaagatgtctgggtgaaagagccggtgctaggttggatgggtgggcagcccaatgagcccaagggccctgaggataggggaacttagagggttggttgcctgagtccctgaggggtagagggaacccgagaagggcaagtgtctaggacagtgatctggaaattgggatcaccaaggagttggacattcacttagcaaacatttattgggtactatatacctataccaggcactattttaggtttcatgaatatagccacgaacaaaacagatcaaaaatctctgccctcaggatttaaattgtactggaaggagacagacaagcataataaacaagtaaacttttttgtctgttgcaaggtgataaatgcaatggagaaaaataaaacaggacaagaggtatagatagtgcaagtgttggattgcaccctgggaccatcggaaggcctgaggtccctagcagaaggtgggaaattaacgggaagtggtagaaagggtacctgcagagtgctcactctgggtttcttcctccaatttttttcaggcagcacatggtctcctacagcgttcattgtcaatgatggggatgtccccgatgggctgaaccttggggcagtagtgagcgatgttgagacaggagtagtatttcttttctactccctttgtgctcacaaggccggctgccaggtggcctctaccatgttggtatggagcaaggatgatggtgtttcctggrgcacaccccggaatctctccctggatattggcactgaagtgtttgcccctggaccgggctctggtattcaggtctctgtcctaggagataggtggagggggctgccttgtggagagtctgagggatacccccaaatggactcctttccaaggggaagattctctgaagtcagattttctggcttgggtgggattccttgaaagacagggcatcctggtaggaacacattatcaggagaagagggaactctgccattggcttcccatttggcattgtcaacaggactgcgttagtccatgcaataccctcatgcaaagtagaaaaaggcactgcctctttggacagacacaagcctgtgccagggtgcacagcttggcgagtgagcacaggttgggtttaagctctcatgcaccctgtggctgggcccctggtgcacatgtccagctgtacaccctgggagagcttcttaattcaaacagggtgtgtatttatgggatctgactggaaccctcagtgagcaagggctgaactcaaggggaccatacatgtgattgcatttgggaagtggtgggttctctgtccctgcctctgagcccctagagtctccttctgtgacacccagttccctttcccacagaaacagcgggagccacggaagggccgcctcatcgtgtgtggccatgggacgctggagcgggacrgagtcttctgtcwcctcagcgatgatcatggtgcctcctggcgctacrgaagtggggtcagcggcatcccctacggtcagcccaagcaggaaaatgattwcaatcctgatgaatgccaggtcaggagtccatgagatgttccctacccatttgaccctccctgccctccagaacatcatttcacgcacagacccagggtctgactgctccactcagtgccacacacccttgctcccctcggggacagggcattttccctgttccctccctgaggtcctgtcctctcccctcagccctatgagytcccagatggctcagtcgtcatcaatgccygaaaccagaacaactaccactgccactgccgaattgtcctccgcagctatgatgyctgtgatacactaaggccccgtgatgtgaccttcgaccctgagctcgtggaccctktggtagctgcaggagctgtagtcaccagctccrgcattgtcttcttctccaaccmagcacatccagagttccgtgagtgcctcatgggtggggtcagcagggagagccctgtgtctagacaaggcctgggcagagaccctctctccctgactctcctgctctccccaggagtgaacctgaccctgcgatggagcttcagcaatggtacctcatggcggaaagagacagtccagcyatggccaggccccagtggctrttcatccctggcaaccctgkagggcagcatggatggagaggagcaggccccccagctctacgtcctgtatgagaaaggccggaaccactacacagagagcatctccgtggccaaaatcagtgtctatgggacactctgagctgtgccactgccacaggggtattctgccttcaggactctgccttcaggaacacrggtctgtagagggtctgctggagacgcctgaaagacagttccatcttcctttagactccagccttggcaaaatcaccttccctttaccagggaaatcacttcctttaggactgaaagctaggcgtcctctcccacaaaaaagtcctgccctcawctgagaatactgtctttccatatggctaagtgtggccccaccaccctctctgccctcccgggacattgattggtcctrtcttgggcaggtctagtgagctgtagaattgaatcaatgtgaactcaggkaactggggaaggctgagcctcctctttggtgttgcggtaagataaccgacagggctggtgaaagtccccagatggcaggatatttggtttcagagtaaggactrggtgcaccmccatgactgactatcaatcaaaatgtttgtaacttaaaatttttaatgaaggataatgaatatttgtagagtctctatggttctgtcaatgcacatcttcgtgtctgttttcctcatgtatccttgtgagcctgggtgagttctggggagagacctgatgtgcgtactgcctgtgaaaatctgactttggcaaatcaaatcctcttttccttttgacatgccctctttttttgttgttgctttttttgagacagggctcgctctgtcacccaggctggagtgcagttgcacaatcacggctcactgaagcctcaacctcctgggctcaagtgatcctcacgtctcagcctccggagtagttgggactacaggtcagtgacaccatgcctggttaatttttttaatttttattttcagtagagacaaggttgcgctatgttgcccaggctggtatggaactcctgtgcttaagcaatcctcatgcctcagcttcccaaagtgctgaggttacagctatgagccaccgcacccagcctacattccttcttatcaccgagaaacaggttgatcttcacaggtgtaatgagtatgaagggagtgccataagatattttttattttttatttatttattttttaatttaatttttttttttttgagatggagtcttgctctggcacccaggctagagtgcagtggtgcgatctcggctcactgcaacctctgcctcccaggttcaagcgattcttctgcctcagcttcccgaatagctgggattacaggtgcccaccaccacacccggctaatttttgtatttttagtagagacggagtttcaccatgttggccaggctggtctcaaactcctggcctcaggtgatccacccgcctcggcctcccaaagtgttgtgattacaagcatgagccatggtgccggcgggctgatttttttaatttttagtagagacaaagtctcactatattgcctaggttggtctcaaactgctgagctcaagcaatctgccggccatgttctctcaaagtgctgggattacaggcttgagcccctgcacccagcctgtaagatattttaaaatccacacttggccaagcgtggtggctcacacatataatcccagcactttgggaggccaaggtgggcggatcacaaggtcaggagttcgagaccagcctggccaatatggtgaaatcccatctctactaaaaatacaaaaactagccaggcgtgttggcttacacttatagtcccagctactcaggtggctgaggcaggagaatcacttgaaccaggaggcggagtttgcagtgagctgagatcacagcactgcacaccagcctcggcaacagagtgagactccgtctgaaaaaaaaaaaatccacgctgttttatatttctaacatggggtaggataccatcctccatgaaatagggtgcaagtgtgtgaaatgcagatgggaatcctgtcccagctagcctgacagagaagtgagcacttcctatggcaaattatgtaagaaaatattccccaggcagatgcttatgaaaagaatctgttcagcctgcaggtaagtgggagagcccttgctcaaaaaaaaaaagaaaaagaaatagtggaagacaaaaaggaaaggacactatgaatgtctgacccatgaactactacctgttagaaacagaagtgctgggaggcttgagagacagacactaccttcctggctaggtgtggtggctcagatctgtaatgctagcacttcgggagaccaaggcaggatgatcaaattaaagggcatcctgggcaacatggcaataccccatgtctaaaaaatttaaaaattagccaagcatggtaacgcacacctatagtcctagctacatgggaggatggcttgatctctttgaccccaggagttcgaggcagtagtgagctatgattgcaccactgcacaccaacctaggtgacagagtgagacctcatctccaaaaaaccaaaccaaaacaaaaaaccttcaagaaagaaaaaaagcttgaccttccctccctcactctttacagacccatggaatctgaagctctggtgttggagccaccaggcattaacaagccttctgggtgattcgtaatacgtttaagtttgaaaaccagggtcagaacttttaaacaagtgcaagtgtccagctaaaatgaattatatgtacgtcaaagttgcagaaatagttaaagaaccttttttttccagctttttttttttcttttaatacacagggaagggtcaggtgcagtggctcacgcctgtaatcccagcactttgggaggccgaggtgggcggatcacaaggtcaggggttctagaccagcctggccaacatggtaaaaccccatctctactaaaaatacaaatattagccatatgtggtggcacacgcctgtagtcccagctactcgggagcctgaggcaggagactcacttgaacctgggaggcagaggttgcagtgagccgagattatgccactgccctccagcctgggcgacagagcaagacttcatcttaaaaaaaaaaaaaatacacaggaaagattgggacaagtggcaggagactgaaaggggaaagagcttgtttgtactaatgggacaaagtgggccgactctgggcacactgcttatgagttagctctactctgtgaggaaattttttttttttttttgagacggagtcttgctctgttgcccaggctggagtgcagtggcgcaatcttggctccccgcaacctctgcctcgctggttcaagcaattcccctgcctcagcctcctaagtagctgggattacaggcgcctgccaccacgctcggctaattttttggtatttttagtagagacccggtttcaccatgttggccagactggtctcgaactcctgacctcaggcaatacgcccgcctcggcctcccaaagtgccgggattacaggtgtgagccaccccacccggccaaggaaatatttaaaaaataaaataaaataagttatttaaaaattggggcaagttggctgggcacggtggctcacgcctgtaatcctagcactttgggaggctgaggaagggggatcacttgaggtcaggagttcaagaccagtctggccaacatggtgaaacactgtctctactaaaaattcaaaaaattagccaggcattgtggcaggcacctacaatcccagctactcaggagactaaggcaggagaatcgcttgaacctgggagacggagattgcagtgagttgaaatcatgccactgcactccagcctgggctatggagcgagactctccctcaaaaaaaaaaaaatcggggtaagtgttatcaatctaaaaaataataattaaaaagttcagaatctaggccaggcgctgtggctcacacctataatcccagcactttgggaggcagaggcaagcgaatcacctgaagtcaggagttcaagaccatcctggtcaacatgacgaaaccccgtctctaccaaaaatacaaaaattagctgggtgttgtgggtcgcgcctgtagtcccagctattcaggagactgaggaaggagaatcgcttgaacccgggagcgagaggttacagtgggccaagatcataccattgcattccagtctgggagacacagcgagactgtcttaaacaaacgaacaaaagctgagaatctagtgttgttgctttttacagatggagtcttgccatgttgcccaggttagattcagactgaagttcaagggatcctcctgcctcagcctcctagagtagatagagttgggactgcaggcacataccactgtaccaggcttagaatctagtttaaagagtttatccaccggctctccctccctctccctctgtctccctctccccacggtctccctctcatgcggagccgaagctggactgtactgctgccatctcggctcactgcaacctccctgcctgattctcctgcctcagcctgcccagtgcctgccattgcaggcacgcgccgccatgcctgactggttttggtggagacggggtttcgctgtgttggccgggcaggtctccagcccctaaccgcgagtgatcccgccaacctcagcctcccgaggtgccgggattgcagacggagtctcgttcactcagtgctcaatggtgcccaggctggagtgcagtggcgtgatctcggctcactacaacctacacctcccagccgcctgccttggcctcccaaagtgccgagattgcagcctctgcccggccgccaccccgtctgggaagtgaggagcgtctccgcctggccgcccatcgtctgggatgtgaggagcccctctgcctggctgcccagtctggaaagtgaggagcgtctccgcccggccgccatcccatctaggaagtgaggagcgcctcttcccagccgccatcacatataggaagtgaggagnnnnnnnnnnnnnnnnnnnnnnnnnnnnnnnnnnnnnnnnnnnnnnnnnnnnnnnnnnnnnnnnnnnnnnnnnnnnnnnnnnnnnnnnnnnnnnnnnnnnnnnnnnnnnnnnnnnnnnnnnnnnnnnnnnnnnnnnnnnnnnnnnnnnnnnnnnnnnnnnnnnnnnnnnnnnnnnnnnnnnnnnnnnnnnnnnnnnnnnnnnnnnnnnnnnnnnnnnnnnnnnnnnnnnnnnnnnnnnnnnnnnnnnnnnnnnnnnnnnnnnnnnnnnnnnnnnnnnnnnnnnnnnnnnnnnnnnnnnnnnnnnnnnnnnnnnnnnnnnnnnnnnnnnnnnnnnnnnnnnnnnnnnnnnnnnnnnnnnnnnnnnnnnnnnnnnnnnnnnnnnnnnnnnnnnnnnnnnnnnnnnnnnnnnnnnnnnnnnnnnnnnnnnnnnnnnnnnnnnnnnnnnnnnnnnnnnnnnnnnnnnnnnnnnnnnnnnnnnnnnnnnnnnnnnnnnnnnnnnnnnnnnnnnnnnnnnnnnnnnnnnnnnnnnnnnnnnnnnnnnnnnnnnnnnnnnnnnnnnnnnnnnnnnnnnnnnnnnnnnnnnnnnnnnnnnnnnnnnnnnnnnnnnnnnnnnnnnnnnnnnnnnnnnnnnnnnnnnnnnnnnnnnnnnnnnnnnnnnnnnnnnnnnnnnnnnnnnnnnnnnnnnnnnnnnnnnnnnnnnnnnnnnnnnnnnnnnnnnnnnnnnnnnnnnnnnnnnnnnnnnnnnnnnnnnnnnnnnnnnnnnnnnnnnnnnnnnnnnnnnnnnnnnnnnnnnnnnnnnnnnnnnnnnnnnnnnnnnnnnnnnnnnnnnnnnnnnnnnnnnnnnnnnnnnnnnnnnnnnnnnnnnnnnnnnnnnnnnnnnnnnnnnnnnnnnnnnnnnnnnnnnnnnnnnnnnnnnnnnnnnnnnnnnnnnnnnnnnnnnnnnnnnnnnnnnnnnnnnnnnnnnnnnnnnnnnnnnnnnnnnnnnnnnnnnnnnnnnnnnnnnnnnnnnnnnnnnnnnnnnnnnnnnnnnnnnnnnnnnnnnnnnnnnnnnnnnnnnnnnnnnnnnnnnnnnnnnnnnnnnnnnnnnnnnnnnnnnnnnnnnnnnnnnnnnnnnnnnnnnnnnnnnnnnnnnnnnnnnnnnnnnnnnnnnnnnnnnnnnnnnnnnnnnnnnnnnnnnnnnnnnnnnnnnnnnnnnnnnnnnnnnnnnnnnnnnnnnnnnnnnnnnnnnnnnnnnnnnnnnnnnnnnnnnnnnnnnnnnnnnnnnnnnnnnnnnnnnnnnnnnnnnnnnnnctctgcgcggccccaccccgtctgggtaggtgtgcccaacagctcattgagaacgggccaggatgacaatggcggctttgtggaatagaaaggcaggaaaggtggggaaaagattgagaaatcggatggttgccgtgtctgtgtagaaagaagtagacatgggagacttttcattttgttctgcactaagaaaaattcctctgccttgggatcctgttgatctgtgaccttacccccaaccctgtgctctctgaaacatgtgctgtgtccactcagggttaaatggattaagggcggtgcaagatgtgctttgttaaacagatgcttgaaggcagggtgctcgttgggagt

SEQ ID NO: 96140 - DNA, 30449 bp, Homo sapiens
agagtctcggccgtgttgcccaggctggtcttgaactcctggactcaagtgatcctcccacctcagcctctcaaagtgcagtgactacaggtgtgagccaatatgtgtgtggctttaaagtgacttttctgttgggatgagaaagaagatctttctccttttttttccttgagacagggtctcactctgttgccctggctggagtgcggtggcgcgatcttggctcactgcaacctctgcctcctgggttcaagtgattcttccacctcagcctcccgaatagctgggattaccggtgcatgccaccactcccagctaattttttgtatttttagtagggatggggtttcaccatgttggccaggctggcctcaaactcctgacctcaagtgatcctcctgcctcagcctcccaaagtgctgggatcacaggtgtgagccaccacgcctggccaaaagttctttctcttatgtttgttgtcagaccacttttgtgctatgtatctccccctccttaagggacttaataaaatgacaccactttgtacaattcccaaatgttatttcactgctggagatggtggggtgctgtcaaatgtttttcagcagctagcaatatggtgagaacattactgaggcagtgggtttcagatactgggtgtttgtttttgtttttgttattaggcagagactcaccctctgtctcaaaaaaaataatgattgcctagtactagttcatttaaattaatttcctagagcatatttaagtgggtcttttttttttttttttttttttgagacagatccttactctgtcaccgaggctggaatgcagtggcatgatcttggctcactgcaacctctacctcctgtgttcaaatgattctcgtgcctcagcctcctgtatacctgggactacaggcatgcaccacacacagctaatttttgtatttttatattttatttttaaattttttttttcctcctgggttcaagtgattctcgtgcctcacctcctgagtagctgggattacaggtgcacaccacaatgcccagctaatttttgtatttttttttttttgagacggagtcttgctttgtcacccaggctggagtgtagtggtgtgatctccgctcactgcaagctctgcctcccagttcacgccatttttctacctcagcctcccaagtagctgggactacaggtgcccgccaccatgcccggctaattttttgtatttttagtagagacggggtttcaccgtgttagccaggatggtctcgatctcctgacctcgtgatccacccgcctcggcctcccaaagtgctgagattataggcgtgagccaccacgcccggccaatttttgtatttttagtagagatggggattcgccgtgttggccaggctggtcttgaagtcctggcctcaagtgatccgcccaccttggcctcctaaagttctgggattataggcatgagccaccgcacatggcctagacgctgggttttaaagactttcagaattttacaaaaattggggcagagaactgccaactttatttttggcaagataaggacgtttttaaaactgctatttattacgattatttttatttatttatttttcttgagatggagtctcactctgtcacccaggctggagtgcagtggctcgatctcgcctcactacaacctccacctcccgggttcaagtgattctcctgcttcagcctcccgagtagctgggattacaggcgtctgccactatgcccagctaattttttgtatttttagtagagatggggtttcacgatgttggccaggctggtgtcgaactcctgacctcgtgattcgcccgcctcgtcctccctaagtgctggaattataggcgtgagccaccgtgcccggccacagttattttattttataactttaaaatagagatgaggtcttgctatgttgtctgggctgttctccagctggcttcaggcgatcctcctgcctcagcctcccagaatgcttggattataggcgtgaacaaccattcccagccaaaggctgtttttttaaatttttgcaccattctctcaaagagcactggtgttttgatagcattcctcaaatagcatttcaaggggctcgaggattggggaatggagaggacatcactcatgcctgcatcatcaagagtaatgctacctacctttatccacatatgggctctggttccaaagcaataaatgtttgaaaatagctagcctgggtgacattcacagtgagaccctttctctacaaaaaaaaaaaaaaaaagtcgggaatggtggctcatgcctgtaatcccagcactttgggaggctgaggtgggcagatcatgaggtcaggagatcgagaccatcctggctaacacggtgaaaccccgtctctactaaaaatacaaaaaattagccaggagtggtggccggcatctgtagtcccagctactcgggaggctgaggcaggagaatggcgtgaacctgggagatggagctttcagtgagccgagattgtgccactgcactccagactggccgacagagcgagactccatctcaaaaaaaaatcagctgggcatggtggctcaagcctgtaatcacagctactcaagtggccacagtgagccatgatcacgccatttcactccagccttggccatagagtgagaccctgtcgcaaaaataaaaaaaaaatagctgatggttttgggagtcacacagacttggactgaagttcccatttgttctaaactcataaagtttaaaacaacctctctgagcccctggaaggtaataactactttgaaagatggctgtaaagattacaaatactatatagaatacaggtctagcctttaccagttgtttaatggtagctgttaagaataggttggtttggccggggacagtggttcacacctgtaatcccagcactttggggagctgaagtgggcagatcgcctgagatcaggagttaaggaacagcctggccaacatggtgaaaccccatctctactaaaaataaaaaattagccgggcatgatggcatgcgcctgaagtcctagctactcaggagactgaggcaggagaatcgcttgaacctgggaggcagaggttgcagtgagccaagatcacaccactgcacttcagcctggctgacagtgagactccatctcaaaaaaaaaaaaaaaaaaaaaaagaatggattggtttagggagaggagatgtggggttgaaaataaactactctgttagttgtctttcctactccagggcttaggaatgcccccttttggttctaccttttctgacatcctcaagtccttgacttctcccagtcatgttctcatcccagctctgaagtcacctctatgttgactttgttataaactaatttgattcttctctccctctgcccttgacagcatctgtggaaccctccattctgtggatcaggtgagatatagcacgggccccagaattggttcctggagaaggagaggggagacttaagggttgggttcttacatcatgtctctagggttaataatggtgttcgtcggccaggcacggtggctcacgcctgtaatcccagcactttgagaggccgaggcctgaggtcaggagttcaagacaagcctgacaaacatggtgaaaccccgtctctactaaaaatacaaaaaattagctgggcgtggtggtgggcacctgtaatcccagctagtcgagaggctgaggcaggaaaatcatttgaacccaggaggcggagattgcagtgagccgagatggcaccattgcactccagcctgggcaacaagagcaaaactcttgtctcaaaaaaaaaaaaataataataataatggtgttcatcttcctttcctagtatctcaacatcaaactaactgacatcagtgtcacagaccctgagaaataccctcacatggtgagttggggtctgtggagaagaggaaacacctctaaagcaggaggcccctgggtggttagaggacatttttaagggtgttttcatatttgtccatctttgtctagttatcagtgaagaactgcttcattcggggctcagtggtccgatacgtgcagctgccagcagatgaggtcgacacacagttgctacaggatgcggcaaggaaggaagccctgcagcagaaacagtgatggctcctcctcctcttcccctccctctttcattggtgwcccataaccccaagtcccagcccagaacccctaacccccaatacttgaaggggttttgtttttttactaatgatggttttgtgggttttttttaagggatgagtggatgagaggagtaatagggaacagctatcctctcttgagaaggggaggataagtaggctgggaaacttcaaagccttcccagtccccagcacctgcctttctcactacttctctggagatggtaggagagtttcctaggtctttccagggcagcatgtgattcatttggggatggaaggaatctgtcccgcatcgggaataaaatttatgatgcaaatttgtgttttggttctgttactatgtgttgggcagggggctgggacatggaaaaggatgtcgaattcatccaagcccctgttactctgcgttaacccagccaagaatccaactcagcttcccactactctccttggtataaagcatataatacagttgctctacaccatgtttccccaacatgtccctacctgtatgttctccctgtggccttttgcttataccatacctgcaactggagtgcttgctgtccttccattaatgtgatagtgtcataagatacatttcatgctaccagacttcaccaatccaaccaaatcagttcatgttttctgaatatgtatagaagataaatacaagtgatgtaatttatattttagagaaaagttgtgactgggaattactaaacttcattcactcattcagcaaatatgagttcatgatacagatgagacttctcagccttaagggacccttagagaccatctagtgtgaccctcctttttgtttttgagacgggagtctcactctgttgcccagggtggagtgcactggcttggtctggctcactgcaacctccgcctcccggttcaagcgattctcctgccacagctcctgagtagctgggattacagatgcccaccaccatgcccggctaatttttttttttttttttttttttgagatggagtctcactttgtcacccaggctggactgcagtggtgtgatcttagctctgcaatctccgcctcccaggttcaagtgatcttcttgcctcagcttcccaagtagctgggcttacaggtgtgtgccaccacgcctggctaatttttgtatttttacaaatactgcagctctgtcgccaggctggagtgcagtggcacgatctcagttcactgcaacctcaacctccagggttcaagcaattccctgcctcaggctccggggtagctgggattacaggcgcctgccaccacacctggctaatttttgtatttttagtagagacggggtttcaccatcttggcctggctggtcttgaactcctgacctggtgatccacccgccctggcctcccagagtgctgggattacaggcgtgagacgggctttcaccaccttggccaggctagtcttgaacttctgacctcaggtgatccgcccacctcggcctcccaaagtgctgggattataggcgtgagccactgcgcccggccgtcacccttttttcatacatgaggagatgaggctcaaagaggaagctggacgccagggcctcggcaaatggacctccccttcggtcctcatcaggcggctccctgctgggcacctccccgctaccgggtggggaacgccctccaccggcagggccggccgaccctcttgggccagttccctagctgcccgctgggcgccgccctcgccacccggccgaggacccgcacaaggtgcccgtggcggcgcctgacgggagcgtcgtgctcaggggtgtcctctcgtcctgcgtccgcgcccagcgccccgcgccccgcgctgttcctcgtgagaccggcgggcggcgagccgcgcggcccccggggcagtgtcggacacggcgggcgcgcactcgcaggcggggcacggccgcccccgccaggacccgcaggcccggaaacgctccctgtcacaaaggggggaacacgtgggcgccggctgccggggcggcgatcttagggaactagggtcacctggagagccgcccaccgtctctgcccgctcgactcctccgcccgggccgctcggccggtccagccgcggccggcgcctggctgtgaggtggattcccggcccagtctgaccatctccctccagtacgtacacgcggctcgaacccgcatccaaccagacgccgacccgctcctgagagccttccacactccccgaagccccgcgatggtggatagttcctcttccccaggaactccccactgacactgcccctctgagagccaggtcctcggctcctgacagcctgcctggtcagaccctcagtcctatgggactcgggtgtctgcggcgaaggagctcccgtgagggtcccctctctactcaaacataggacccacctcgatcccgcagtcttcccctgtctctctttctccttaggtttttccacttcgttcggaccttctcataactatgtccaccctctacgtctcccctcacccagatgccttccccagcctccgagccctcatagccgctcgctatggggaggctggggagggtcccggatggggaggagcccacccccgcatctgtctccagccacccccgactagcaggactmsctttcccccaccccgcctgccggccctggagcaggggcccggtgggctctgggtgtggggggccacggctgtggcccagctgctgtggccagcaggcctggggggcccagggggcagccgggcggctgtccttgtccaacagtgggtcagttacgccgacacggagttaataccagctgcctgtggagcaacgctgccggccctgggactccgaagctcggcccaggacccccaggtgagggggttgtacagaagagggggaggggagaaattcagaggagggaagcgaggactggaatggacaatgagacaagaaggtagtacatcagatgtgggaaaagagtgatcaaatcccagattgccaactggtatggtaaccctgggcacgtttcatagacccgctgtgtcttggtcttcctatgtctatgaacacgcaggcaagttgatgtaatgcttgcctcactgagttaataggattaaaagatgtgcgcagagcacatagtttagtgccaggcacttttaaagtctcttrgtaaaagtttgatgagtctgaaattgatgaggatagaagttatttgaattgtaggaaaagactgggtgagggagagatgacaattgctgggaggagataaaagagaaatgaaatgaggaaggtaagtgagaggagagataaccctgccagattgtaactatcagtccttccaaaggagacctgtgccttggtgtactttcaactctgcctccttgcatggtattgagcacatgatggaaaattagtatttcttgaatggatgaatgaatgtggcagaccctgacttgctccctcatattgtgatcaccctatctacaatagagtccttgcattcagaatgtctgtccaaacaaacaaataaaatagagtccctctcttctggaattccctgtttgttcccctcttttatttcttttcttttctttttttttttttttttttgagacggaatctccttctgttgcccaggctggagtgccacggtgcgatggtgcgatctcagctcactgctcaagcgattctcctgcctcagccttctgagtagctgggattacaggcgcccaccaccttgtccggctaattttttgtatttttagtagagatggggttttgtcatgttgaccaggctggtctcgaactcctaacctcagatggtctgctcgcctcggcctcccaaagtgctgagattataggtgtgagccaccacgcctggcccctgttcccctcattctgctttatttttcttcataggagttaagaaaaatagggcacttcattttatatttgctcatttgttgttcccctacaagaatgttaactctaccaggtcagggttctgtccatctgttcgtgttttcctctcattccctggagaagtacttaatacatatttattgatgttctgaacctggcagttattgagatgcctcatataatctttacttctatgcttaacatattgcatctaacacataagtattgagtagggatttgttggatgagtcagaagtgttttgtttttttttttctgagacggagtctcgctgtgttgcccaggctggagtgcagtggcgtgatctcggctcactgcaagctccayctcctgggttcatgccattctcctgcctcagcctcccgagtagctgggactacaggcgcccgccaccacgcctggctattttttttttgtatttttagtagagatgaggtttcaccatgttagccaggawggtctcgatctcctgacctcgtgatccgcccagaagtatttttattgtgactatttgagtgaagaaatgggactcagaggtggtgatttgtgagagtggggtggagggaggccacatggattgggttgtggtgggagatggaggtgggccaaaccttgtctcacacttcttccccttcctgccaggctgtgctgggggccctgggcagggccctgagccccttggaggagtggcttcggctgcacacctacttggccggggaggcccccactctggctgacctggcggctgtcacagccttgctgctgcctttccgatacgtgagtcaccaggcctggggaagaacaagactgctctcctcagacctcactgtagggtgactgagaagagtcatttatttcctgttccaggtcctagacccacctgccygccggatctggaataatgtgactcgctggtttgtcacgtgtgtccggcagccagaattccgagccgtgctaggagaagtggttctatactcaggagccaggcctctctctcatcagccaggtgaggaagggcgaggagttggaggataggggcttccctggggccttccatgcaactcactttctttttttcctagaaatggcagaatcactggggcagggtcctgcgggagaggagggagaggggggaggtcagcatgggcaagacctcgggcatctaaaataccccatctgaaacctagtatggccgtccaagagggtccccagctggctgagtctgaatttctgcacctctctctaggcccygaggctcctgccctcccaaagacagctgctcagctcaagaaagaggcaaagaaacgggagaagctagagaaattccaacagaagcagaagatccaacagcagcagccacctccaggggaggtgaggcgagggtggagctggaaggaaagttgatgtgtgcggtgatgggttggctgatgcctgggcctatgtcttctccctcccaagcagaagaaaccaaaaccagagaagagggagaaacgggatcctggggtcattacctatgacctcccaaccccacccggggaaaagaaaggtactaggagtgggaaggggctcacccctcagcagccccttctaagttttcaccctatcttgctctattcttgctctcaccactttgtttggtgaggaattgcagaccccctgccctgcctctaggcccctcaaatgcctgtcctatgatgtgagtgacggagatcccgatccctctctgccagcacgtctccttcccagagtgctcccagccacggcactgagccctcccttcctctcccccagatgtcagtggccccatgcccgactcctacagccctcggtatgtggaggctgcctggtacccttggtgggagcagcagggcttcttcaagccagagtatggggtgagtaggcactgctgcccaggcccagagtgggtggggtggggaagggcaggactgaaggatgtgttgcctgggaggggctgggagaggtgacctgaggccttaaacatgtgccatccttctccaccatcagcgtcctaatgtgtcagcagcaaatccccgaggtgtcttcatgatgtgcatcccaccccccaatgtgacaggctccctgcacctgggccatgcactsaccaacgccatccaggactccctgactcgatggtgagcttctatctgcaccttcctctggttccctctgcctagtctggctctctccttttccctgacagccccccgagcctctctccttctgggttggtgctcacttctgcccccagtggtgctacacttctctctgtcattccaatctgatcatttagcttcctctcctagtccagtactcccatgcaacaccgccacttgcagactctcttctatcccttctttctttatttaattttaatttaatttaatttaattttttgtaaagatgagttttcactttgttgctcagtctggtctccaactcctggctcaagtgattctcctgtctcagactcccagagtgctgggattataggtgtgaggcaccacacccagtctctcccttctttttctagtaacaataacattattttgaatttaattaggaacatatgaatatatatatttttttttggggggacagagtcttgttctgttgcccaggccggagtgcagtgacgccatctcggctcatggcaaccgctgcctcctgggttcaagtgattctcctgcctcagcctcccaagtagctgggattacaggaatgcgccaccacaactgaccaaaatatatgaatatattcttgtaagaaatttaaagtttcaaatctccttgaccatccccctccacacctacttcctcctaagatttagccattgttatcactttgatgtgtatcttcccagatctttcctatttacttacatatacacgtacccatagaaatttatagttctccttttgggtgagtcttttctattttttaacataaagggttcatattacacttgttatgatctagctttcttcttacacttaatactttctcttggagatctttccttgtccttacacacataccacacatactgacttccttctttttaattgttccataatatctcatagtgtggctgtaccatagtgaagtcattcttttttttttttttttttttttttttttgagacagagtttcactctttttgctcaggctggagtacagkggcatgatctcggctcaccgcaacctccacctcctaggttcaagcgattctcttgcctcagcctcccaagtagctggcattacaggcacctgccaccgygcctggctaatttttgtatttttagtagagatggggtttcaccatgttggccaggctggtctcaaactcctgacctcaggtgatctgcctgcctcggcctcccaaagtgctgggattacaggcgtgagccactgctcccggcctggagtcactttttaattaatgattcattctgttttttgttttttgttttttttctgttgaaaaccttactctaatgcacatccctgtatatcaagtttgtccaacctgcagcctgtgggccacatgcggcccaggacggctttgaatgcagcctaacacaaatttgtaaactttgtttaaacatttaagaatttttttgcgattttttttttttagctcatcagctatcgttagtgttagtgtatttttttaaatttatttttattatttatttatttatttattttttgagacgggtcttgcactgtcacccaggctggagtgcagtggcacagtctcggctcactgcaagctccaaactccgcctcccacgttaacgccattctcctgcctcagcctcccaagtagctaggactacaggtgcccaccaccacgcccggctaattttttttttgtatttttagtagagacggggtttcaccatgttagccaggatggtctcgatctcctgacctcgtgatccgcccgcctcggactcccaaagtgctgggattacaggcgtgagccactgctcccagccagtgttagtgtattttatctgtggcccaagacaattcttccatgtggcccagggaagccaaaagattggatacccctgctctatatgcttgctgaagcatgtgtggaagggtttcgctggtgtagctatcaagaagtgaaactgctaggtcggcaggggcacacctatattaagtacaaacggaagctgccaagttgccctgcagaatggctttgctgattgatacctccaggaattgctgtgagagtgttcatttccccacccttgctaagcctgagcattagggttgcctaattagttttgccaatctgatgggcaaaaaaatacctctgttgttttactttgtacctttctgattgctattgaagttgtgcctattttcatgttttttggccagtcaggtttacccatatgtgaattgtctgtatctatcttttccccgtttttctattgattcttcgttctttttctttttaattttttttttgagaattctttacctgttctgggtatcaatttttttgttaaatattgtaaatgtttttgttgtattattgtgtggtagttttcctgttaattgtaaatgtttctcctgttttctgttactatttgttttcactgttaatattttaattagtgataaatacaaagtaatattctaggtgacaaatctttttaaaaagtattttaaaataactttaccatttttggaaaccagggtttattatatttaaattttgagaattttttctggtgtcttatgtactaaattaatgtggtcaaaaaatatttactgggcccaactatgtgccacctctgctctgagcactgggaatataatgtttgattgtgcattttgcaagtaactgagagctaggaaaacagttatatgttttatttttttatttttattattattattattattttgagacagagtctctctctgtcgcccaggctggagtgcggtggcgcaatcttggctcactgcaagctctgcttcccaggttcacagcatactcctgcctcagcctcctgagtagctgggactacaggcgcccgccaccacgcctggctaattttttgtattttttttagtagagacagggtttcaccctgtcggccaggatggtctcgatctcttgacctcatgatctgctcacctcggcctcccaaagtgctgggattacaggcgtgacccaccgckcctggcctgtttttttttttgttttttttgtttttttgagacagagtctctctcggtttcccaggctggagtgcagtgatgcgcgcttactgcaacctctgcctcctgagctcaagcgattctcctgcctcagccttctgagtagctgggattacaggcgcatgccaccacacctggctaatttttgtatttttagtagagacggggtttcaccatgttggtcaggcttgtttcgagctcctgaccttgtgatcctcccgcttcggtctcccaaagtgctaggatgacaggcatgagccacttcgtccagccaacagttctgttaaatacacataacatacaatggccaagttgtttgcgtttgtgtttgcgtttttgttttttcaatttttcaattttttttttttctttggaaatggggtcttgctctgtcacccaggctggagtgcagtggcgcagtctctgctcactgcaagctcctcctcccaggttcacaccattctcctgcctcagcctcctgagtagctgggactataggagcccaccaccacgcctggctaattttttttgtatttttagtagagacggggtttcaccgtgttagccaagatggtctcgatctcctgacctcgtgattcgcgtacctcggcgtcccaaagtgctgggattataggcgtgagccaccacgcccggccctgtttttcaattttttaataaaatcaagagagggtctcgctatgttgcccaggctggtcttgaacttctgggctcaagcaatcctcctgcctcagtctcccaaagtgctgggactacaggcatgaaccaccatacctggcctccaagtttgtttacatgaaaacagaatgactacttttttttttttaattgagacagagtctcgctctgtcgcccaggctggagtgcagtgacgcgatctcgtctcactgcaacctcaaccacttgggttcaagcgattcttgtgtctcagtctcctgagtagctgggactacaggcacgcaccaccacgcccagctaattcttttgcatttttagtagacagagttttgccatgttggccaagctggtcttgaactcctaacctgaagtaagccgcctgcctcggcctcccaaagtgctgggattacaggtgtgagccactgtgcctggccacatacttcttataaaactcttaaggtagccacattttttttccagtgaacgtggtttaaataaaatgtgagacactcccattactttaatggaatagagttatatcaactttttatttttatttatttgtttatttatttatttttgagacagagtctctctcactgtgttggccagattggagtgcatcggcatgatcacagcacaatcatagcttggtgcagcctcaacctcagccacccaagtagctgggaacaaaggtgcacgccaccatgcctggcttttttttttttttttttgcagagactaggtctcactatgttgcccaggctagtctgcaactcctgggctcaagcagtcctctcaccttggcctcccaaagtgttggggttataggcttgagccactgtgcctggcttgaattctttaatctatctaaagtttctttttgtgactattggtaagggggagattttttccaaataattagctagttgtttcaaacattttgaatagtttatccttattttactgataggaagtgccaactttcacaaacactaaatttgcttgtatctgtttccaggtactattttgttcctgtttagtaacttattttaacaattagaacttttgctatcctgtttggcaggagcctcctcttcgttcttttttttttttttttttttttttttgagacagagtctcactctgtcatccgggctggagtgcagtggcacaatttcaactcactgcaacctccccctcccagcttcaagcgattctcgtgcttcagcctcccaagtagctgggattacaggtatgcaccaccatcctggctaatttttatatttttggtagagacagggtcttgccatgttggtcaggctggtctcgaactcctgtcctcaagtgatccactcgccttggcctcccaaagtcctggggttacaggtgtgagccaccacgcatgcctgtctttgttctttttccatattgccttggctcttccttcaaatcttttctccttgactagctttagaatcacaagggttccagctccacccctgcttctttctttttttktttgtttgttttttggagacggagtctcactctgtcacccaggctggagtgcaatggcatgatcccagcttgctgcaacctctgcttcccgggttcaagcaattctcctgcctcagccttccaagtagctgggattacaggcacatgccaccacgcccagctaattttgtatttttaatacagacagggttttaccatattggccaggcttatcttgaagtccccacctcaggtgatccacccacctcggcttcccaaagtgctgggattacaggcgcatgccaccatgcccagctaattttgtatttttagtagagacggggttttaccatgttggccaggctcatctcgaactcccccacctgaggtgatccacccacctcagcctcccaaagttctgggattacaggcgtgagccaccgcgtccggcctccctgcttctttatttagtccactgactccttgcctgaagcctctgctttctttggtgccaggccccactggcctggctcaccctctggtcctycatgccccctaacaggcaccgcatgcgtggggagaccaccctgtggaaccctggctgtgaccatgcaggtattgccacccaggtggtggtggagaagaagctrtggcgtgagcagggactgagccggcaccagctgggccgcgaggcctttctacaggaagtctggaagtggaaggaggagtgagtatgcagcatccctgtgggcatcgcagccctgcctccctgtcccctatccagaagacctctgtcacctgtaaccccttggccacagggtcagaccctcccacagaggcagagtcagttggctctagggcccaggtaaatttcagggggatgggtgatctccacactgcccagtcagccacctgatgtctccctctagcccaggcacgagtgctgacctcagcctgtctgcttccaggaaaggtgaccggatttaccaccagttgaagaagcttggcagctccttggactgggatcgagcctgtttcaccatggaccctgtgcgtgggaggagtgtcaaagctggggcaggagtaggagtctccccagggtgggacccccacaggagaaagcagaggtgttgtggccctctctcaggagctggcccatgtaaaacaccatggagggctcagctgcaaatgccacttcccacccctcgccatggccctttccatatcatggcccttcatgttccctgtcttggctctgggagctccagattcctccagatggcacatgatcaggaccccgtctcccatggagcytgaactcccagtgtcctctgcaccagtacttgtccccagctgattgtcttcctcgccatctgcagcattacaaggcttgttgcctgctcttgtgttcccttagtcctctctccccctcaaggaaagaaggaaagtactcccctcagaggggtctttgtgctggccagtgggactctgtatgggcaaggcctcactggagccctgggtgtctgcctgggcctccaggcacaaggcccatctctctgacttctccctcctccaccccagaaactctcagcagctgtgacagaggcctttgtccggcttcacgaggaaggcatcatctatcgcagtacccgccttgttaactggtcctgcaccctcaactccgccatctctgacattgaggtgcgccccccaacctggcctgtctccatctccaatctaccctggccctggccctggcccctgggccacgcctctaaatacccattttacaggtggataagaaggagctgacaggtcgcaccctgctctccgtgcctggctacaaggagaaggtggagttcggggtcctcgtgtcctttgcctataaggtccaaggctcaggtaggagccaggggcaccaggatcctgggctgggagtggcaggaaggggccaaggccaagaccacaaggccttctgtcaccccagatagcgacgaggaggtggtggtggcaacaactcggatcgagacaatgctgggagatgtggctgtagctgtgcaccccaaagataccagataccaggtgggggactgtccacagttagggaaggagttctggccaaaaagggctcccatccttatggggtggaggggttggacttaggcccctggctgaggagaggaaactgggttagaaactggtcttcagcttctttcccagctctgagggtagagctattggggactgtttgggggagttcaagtgttgggatagtcagggccctggaaaggaaggacttgggcccagcccttcgtgcatttttaaaaagttaaatagccaggcacrgtggctcatgcctgtaatcccagcgctttgggaggctgaggcaggtgaatcataaggtcacgagttcgagactagcctggccaacatagtgaaaccccatctctactaaaaatacaaaaaattagccagttgtagtggcgggtgcctgtaatctcagctactcaggaggctgaggcaggagaatcgcttgaacctgggatgcggaggttgcagtgagctgagatcactctgctgcactccagccttggtgacagagcgagactccgtctcaaaaaaaaaaaaaaaagttaaatagagacaaggtctcactctgttaaccatgctgatcttgaactcctggcctcaaggaagcctcctgccccagcctcccaaagtgtgggggttagagatgtgagccatggcaccaggccccttcatgcttttatttatttatttatttttgagagagggtctcactctatcgcccaggctagagtgcagtggcaccatcttggctcactgcaacctccacctcccgggttcaagcagtacttgtgcctcagcctcttgagtagctgagattacaggcacgcgtcaccacacctggctaattttttttttgtatttttagtagagactaggtttccccatgttggccaggctggtctccaactcccggcctcaagtgatctgcccacctcagcctcccaaagttctgggattacaggtgggaatcacggcgtctggccctgcttcatgcgtttttggtatctttccgcccccagcacctgaaggggaagaacgtgatccacccattcctgtctcggagccttcccattgtcttcgatgaatttgtggacatggactttggcacaggtgggcaaggggctggtcctgtggggagaggaaaagactggagctgcaccctagctgtccatcttctctcagagaaaaagaaaataagcttcagccaaatagacagagcttggggtggtyctcaagggactgtattagacaagtgggggccaggagtggtctcggagctacatccttcagcaaaagaggtgagtgtaggaaggaactccgtggagtccctcatgacctgggcatcctgatgtacacccaggtgctgtgaagatcacccccgcacatgaccaaaatgactatgaagttgggcagcggcacgggctggaggccatcagcatcatggactcccggggggccctcatcartgtgcctycgcctttcctggtgaggctgcctgaggcaagagtgcccgggtcagggagatggagggatggctgggcatcgccatgatgaggcctcattcctacccagggcctgcccaggtttgaggccaggaaagcggtgctggtggcgctgaaggagcggggactgttccgtggcattgaggacaaccccatggtggtgccactttgcaagtgagggtgggggcctgggacgggaggaagatggagggctcctcagggttttaccgcctggccttctcacctacgtgtacccccagccggtcgaaggacgtggtagagcctctgctgcggccgcagtggtacgttcgctgcggggagatggcccaggctgccagcgccgctgtgactcggggtgacctccgcatcctgcctgaggcccatcagcgcacatggcatgcctggatggacaacatccggtgtgtagggtcctcagtgtgggaggggcttgccgagggctgagcagggctcactcgggccaggctccatcaggccctccctgatttctcctccccgacatttgcagggagtggtgcatttccaggcagctgtggtggggccatcgcatcccagcctactttgtcactgtcagtgacccagcggtgccccctggggaggtgagcagagggccagagctagctgctgggacaccctgctggagtggtgggtttactggrtccttggtggggggaggggcagggtgagccagaagcagacacacccccttgggtaatcactgcacctgtggcaggaccctgatgggcggtactgggtgagtggacgcaatgaggcggaggcccgggagaaggcagccaaggagttcggagtgtcccctgacaagatcagtctccagcaaggcaaggcggggctttgagggtctggagggagttgtggggggcagagctccactccctctgacctctgacctttggcctctctcagatgaggatgtattggatacctggttctcctctggcctcttccccttatccattttgggctggcccaaccaggtgtgttcctggggccggggcttggcgggacaggggactggagggtgggtgttggctccccttcacaccctggtctgccctcagtcagaagacctgagtgtgttctaccccgggacactgctggagaccggtcatgacatcctcttcttctgggtggcccggatggtcatgctgggcctgaagctcacgggcaggctgccctttagagaggtgcggagacagccgagaccctcccatsgcccccagcctcctctcctaccgtcctgtgctgcagcgcagacccygcgtggctggggcatggggttagctgtgggcaggcctgaccygggggctggtgtggggttgaaatccagcctgggccctgctcagtgattcctgtgcccagggcttcatcttcccagaggaaggagtgcttctgattcacataaaggcgctcaacgagctcttggggacactcagtgggacctgaggttcacagtggggtagaccagacacagtcctggtcggggcactgaggccggggaaggagaggactgagtctcatgggcctccccacctgctctgcaggtctacctccatgccatcgtgcgagatgctcacggccggaagatgagcaagtctctaggcaatgtcatcgatcccctggaygtcatctatggaatctccctgcaggtgggctgggtgctgggccagccaggaagggccgtggggctgtggtcacagccacctgactgctcccactccaccctcagggcctccacaaccagctgctgaacagcaacctggatcccagcgaggtggagaaggccaaagaagggcaggtatggagggttgggctgggctaagcaggagcacagcgtggatggggctggctgaggacgctcctccccctgcctcttccctgtagaaagctgacttcccagcggggattcctgaatgtggcaccgatgctctccggtttggattatgtgcctacatgtcccagggtatggcccccaaagcgtccctcccagccactccttcctccttctgtgaggcccatccctcttctccaccctgagcctctggtgggcatgggctgggaagagggtgatgaggactcacatctcacccccgacccaggtcgtgacatcaacctggatgtgaaccggatactgggttaccgccacttctgcaacaagctctggaatgccaccaagtttgcccttcgtggccttgggaagggttttgtgccctcacccacctcccaggtaagggcctggtgggcagcaaagctggcagcactcacacaggctgtacccctgtccggagcagcctccatgtagctggggggacagatagacacagagacagacagttaaagggaaagcccagcgcattgggggctggggcctgtcacttcttcccagatcctggcacataggtggttgctttggactcatcagactctggatgaagatttgcccatgactcctgcccccatggggttctggcaccctcccctggcccgccggctgatacaccctctctccccaagcccggaggccatgagagcctggtggaccgctggatccgcagccgcctgacagaggctgtgaggctcagcaatcaaggcttccaggcctacgacttccyggccgtcaccactgcccagtacagcttctggctctatgagctctgtgatgtctacttggtgagaaggagcacagcggggcaggggatggtgggggcaggtggscagcagagccctgggctcagttttgccagagttggccttgagacctaagccaacccatccccttcccagtcctcacaggcacagcgagggctcaaggctagacctccagccgtgagccctgtacctctcgtcccctaggagtgcctgaaacctgtactgaatggggtggaccaggtggcagctgagtgtgcccgccagaccctgtacacttgcctggacgttggcctgcggctgctctcacccttcatgcccttcgtgacggaggagctgttccagaggctgccccggaggatgccgcaagctccccctagcctctgtgttaccccctacccggagccctcagaggtatggcatggcctggagaggggagtctgacctgccctccaggccccctcaccccctcctccaccccacagtgctcctggaaggaccccgaggcagaagccgcccttgagctggcgctaagcatcacgcgagccgtgcgctccctgcgggccgactacaacctcacccggatccggcctgactgtgagcctcaggcccccatgtccgccccatcccactgtcccctcagcctactctgggacccagtgtccggcagtgactgcttggtttcctgtctccatggagctaggcctcacctttctccctccctggcaggtttcctggaagtggcggatgaggccacgggcgccctggcatcggcggtgtcgggctaygtgcaggccctggccagcgcaggtgtggtggctgttctggccctgggggctcccgccccccagggttgcgctgtggctctggcttctgatcgctgctccatccacctgcagcttcaggggctgrtggaccctgcacgggagctgggcaagctgcaagccaagcgagttgaggcccagcggcaggcccagcgtctgcgggaacgccgtgctgcctcgggctatcctgtcaaggtgccgctcgaagtccaggaggcagatgaagccaaggtgtgtggcctgggtgggcatttcccacaccatccccttcctccatcaaaaccctggtctgggctggtccgagtgcagtggtgttgacaactaattgatcgtaaccagttacagatttctttgttccttctccactcccactagccttaaaaaacaaaacagcctggctcagtggctcacacctgtaatcccagaratttgggaggccaaggtgggtggatcacttgagcccaggggtttgagaccagccaacatggtgaaatcccatctctacaacaaaaatacaaaaattagctggccatagtggcacacacttggggtcccagctactcggggggctgaggtgggcggattgcttgagcctgggaggtcaagactgcagtgagccgagatcatgccactgcacttgagcctgggcaacagagagaagaccctgtctggaaaaaaaacaaaacaaaacaaaaaccaatcctggtctggaagctggactctgtacccaaccctggggaatccactggggagcatggagcccaggcgctttgagcagggaccatagaaggccctccccttacacatggggagcagctgggggctgggcacaacccagggtcacacaacaggtgggagacggaggctgacctagaaccaggcatcctatctcccagccagacccttcgtaccccacccagctgcccaaaatgtggaaacctgcatgcctggggctgggcttggggtccacatgtagtcggggagccctgggcctcccaccacttactttcaagcctactgggctgaccctggaaggccagtcttgtttgtcccctgcctcctgggttccgccagagagaagcagtggagtaaactgcacagacacagagaaaaccagtcatggaggccaagarctagagagccttgagtggacgtggttaatctcacttggttctcccaagagccctgggaggggggcaatatcatcatcatcatctgacaaatgaagtgaccggcctgggagactgtgctctcctgcttaggtggggacactgaatggggaacacgtaggctctgaggttcctttgttcttggggactcaccacttggtggaaaaaggcaagacccaagaggtggtggtggaagtgggggtgctggtgggaatgggtggggagccaggccagccaggttcacgcctcctctgagctactgacctcccatggtcctcgctcatcttyccaactttgttgtcctgggtgtttgggggtctcttcacttggacctgggtcctyacccaccccctggttccactccagctccaacagacagaagcagagctcaggaaggtggatgaggccatcgccctattccagaagatgctgtgatccaccacccagcttcacccctcacccccagcggctcaccatggggatggcagcaataaaatattttcccacaaaatcctcttgtcatctgtggtgggggcagagaggggagcagaggggctgggtgcctgaatccttgggggctgcagggtgggagtgaggccctggttctggagggcagaggggtgcgtctatctgggtctgtccctggcactgtgccaggcctgagtcacgctgcttactcccttcctcctccccagctctcactcacctccgcactgcagccaagggaggcccgccctggcgtgggctgctgcctgtggctttgggcaggcaggagcgaaagggccaggggttgcctgtcctcccccaccctgttgaggccttcctccccctctgctgagcctcggttaattataactctgacctaagtgccctgtgacgtcaagcccgggccagccctgcccaggagacccagcaaccaggtaggggagggcctgagaggactcaggcttcctgagcatggggagtgtttctgcggcagggctggggacgcagccagggactggggaggggggcgtgggggaggaaccttggacccctctcctggcaggtgtgtatgtccctaatggtccgatgaggccctcaggttgtctgggtgacagcgagagggtggggaagccaggctggagcagacacgacttttgaggtaaagcaggttcccatggagacccgcagagccggcctgccctggaatcgcggctgcttcctcctcccttgagagccttctgtctcccaggtccatgtctcagccatgctccccacggaggtcccccaatcccacccgggcccctcagcgttgcttctgctgcagctgttgctgccccccacatctgccttcttccccaacatctggagcctgctggctgcccctggctccatcacccaccaagacctaactgaggaggcagcgctcaacgtcaccctgcagctcttcctggagcagccacccccaggccgcccccctcttcgtcttgaggacttcctggtgagcatcccagggtcctgtcacacccctgccagagtccccaattccatggggcctctactccttgagggctctggttgccaagagaagagacacccatggccccacccctgcagcaataatacccagtagtcttggtcctgaaattaggagtccccctccttagaaaggtccgggactgtccctcctttgtggggctcaggaccctcatacccagccttgagtgtcagttgctgagataaggtgggcaacagtcaatccaaagggcctccctggagccccgtcgcccgctattctccccagggtcgaacactccttgctgatgacctctttgccgcctactttggacctggttcttctcggcggttccgagcagccttaggtgaggtgtctcgtgccaatgcagcccaggacttcctgccaacttccaggaatgacccygacctgcactttgatgctgagcgactgggtcagggacrcgcgcrcctggtaggggctctgcgggagaccgtggtggcagccagggcccttgaccacaccctggctcgccagcgcctcggggctgcacttcatgccctgcaggtgagaacagggttgggttgatggtcagaggggtcttcacttccgtgcctgtccgggatggagcgcgtcctatggtgccttcttgatcatgtctcctccactctggaaggggtgggcactggcacgcggtgccccgaggctgtgtcccagttccccacctccaagctggcagtgcttcctgtaggaacagcaaggagggcgctgtggctggagagaagtgagggtgagagaggaaggctgcgaggtcagagagctgagggagcagcacacgcagcaggactctgcaggccgagagaggccttgggttagactctgagctgggaagagatgctgggacagtttccacctgggcaaagctctgctctgagcaatggagagagggcagtggaggggacttggggtgtctggtgggagcagtaggggtgggaggggactttcgggatggggaactcaaaggagtggcatattagtgctggagatggtgagaaaggccagactagtgcctcactccccttctcctgtcctccggaccaggatttctacagtcatagcaactgggtggagctgggcgagcagcagccacaccctcacctcctctggccaaggcaggagctccagaacctggcacaaggtatggctgtgaccctggtggtgaggcaggagtccacagggccacctcagtccacccagccactgtgtcacattctgaagtcccagagggtatgatgttacttaatctccacaaggactgaggtcccccagtccaagcaacgcctggctcagttaagcagcttccccaaggtcacacagggaaaagtagctaggaccaggtctccagacctcagtcccgtcttaagtgtggcttcctccccgcactgactcccatggggccttctctcacagccccctcaccctctcacctggaagctgcctcctgtccacaactcacagagggcataatccccataggattggtccctacacgtactgtgtttgtttttttcttattatttatttatgtatttattttttagagatgaggtctcactgtgtggcgcaggctgctctgcccgccttagcctcctaaagtgctgggattacagtcgtgagccaccgcacccagcctgtgctgtgttttccagcacagccctagtttcaaacattcaggctcactgcgggcccatgatcctaggttttagttcagaaagctttgctagggaacttctgggtgttcgcctcatcccagctgggaggagaagctgaaaaggtttgggtgggtggggataaaggctgggggtggcagaatcttgggttctagccctgccctctcttcccagtggccgatcctacctgctccrattgcgaggagttgagctgccccaggaattggctgggcttcacactcctcacctctggctactttggaactcatcccccgaaacctccaggtaccagacaagaaagttccccagaagtaaggggagaaagtcattcccttacaggatctctgtcctgtaggcccgtatgcctttgctatggcatctcctcctaggaggagaggatgctgggaacagggtgggtggaggaaagtcccctgaggaggctgtggtggggttgaggtaggggagcaacttcttcctccgctgataggatttctcccttgtcataggcagttttgggggactggctggagggatcaggggatccaccatgtgctgtggtgactgaccaccacgccctaagatttactccagaattcccctccacaaagcaccatcctttttatcctttttttttttttttttttttgagatggagttttgttctttttgcccaggctggagtacagtggcacgatctcggctcactgcaacctccgcctcccaggttcaagcgattctcctgcctcagcctcccgagtagctgggattacgggcatgtgccaccacgcccggctaattttgtacttttagtagagacagggtttcatcatgttggccaggcttgtctcaaactcctgacttcaggtgatccacccacctcagcctcccaaaatgctgggattactggtgtgagccaccatgcccagccatcatttatttatttatttattttttgagaccgagtcttgctctgccacccaggctggagtgcagtggcgtgatctcggttcactgcaacctccgcctcttgggatcaagctattttccttcctcagcctcctaagtagctgggattacaagcacgcgccaccacacctggctaatttttatagttttagtagaaacagagcttcaccatgttggccaggctggtcttgaactcctgatctcagatgatctgccggcctcggcctcccaaagcgctgggattccaggcgtgagccaccgcgccaaccccgtcatcatttcttgctgaacccttgctgaggggtgagagggtcaggccaggcctgaaagggcctcattttcttaggaggcagtgggtttttgacctccactctccagatccctttccccaacccagggaaatgtagccacgggggccattttgaccggagcagctcccagccaccgaggggaggcatcaacaaggacagcacatccccaggcttctcccctcaccacatgctgcacctccaggctgcaaaactggcccttctrgcctccatccaggccttcagccttctgcgaagccgcctgggagacagggatttctccaggtgagtggcctcctggggatggaccccttcatggggaggcgctcctgcgggaagggagaaaccaggcgctggggacaaacgtgcaggcccttcactgtgtctctggcttgctccccaggctgctggacatcaccccagcctccagcctgagctttgtcctggacaccacgggcagcatgggtgaggagatcaacgctgccaaaatccaggctcgccaccttgtggagcagcggagaggcagccccatggagcctgtccactatgtcctggtgccttttcatgacccaggtaagtgtggtctggctaggacagtagaggggaggaaaattcaaggtaagggatagactgggcgtggtggctcacgcctgtaatcccagcactttgggaggctgaggcaggtggatcacctgaggtcgggagtttgagaccagcctgactaatatggagaaaccccgtctctactaaaaatacaaaattagccgggcgtggtggtgggcacctataatcccagctactcgggaggctgaggcaggagaatcgcttgaacccaggaggcagaggttgtggtgagccccgagatcgtgcctttgcactccagcctgggcaacaagagcaaaaagctctgtcacaaaaaaaaaaaaaaaaaaaaaaaaaaaaaagaaaagaaagaaaaaaaaaagaaaagataaaaaggtaagggataaaggcctgtggtgaggaagtgggctcggggtggcacttcctgtagtcccgagtgagcctctactgtgtgcatacagaaaattagcagcaacctgggtggggtggctcacacctgtaatcccagcactttgggaggcagaggtgggtggatcgtttgagcccaggatttcaagaccaacctgggcaacacagagaaacacaggtctctacaaaaaaattaataaaaattatgtgtgggtgtggtggcacatgcctatagtcccagctacttgggaagctgaggcaggaggatcacttgagcccaggagactgaggctgcagtgagccgtgatggcactactgcactccagagcggcctgggtgacgcagtgagaccctgtctctaaaaaaaaaaaaaaagataactagcagacttgcctcccactctttctaaaatggcagcactttccatgagtttaatgcatgattcatgctttggcacgtggcctctgctttcttaggctttcatgctaataaaccattttctttttttttttttttttttttttttgagacggagtctcgctctgtcgcccaggctggagtgccatggcgcgatctcggctcactacaagctccgtctcccgggttcacgccattctcctgtctcagcctcctgagtagctgggactacaggcgcccgccaccacgcccggctaatttttgtatttttagtagagacggagtttcaccgtgttaaccaggatggtctccatctcctgacctcgtgatccgcccgcctcggcctcccaaagtgctgggattacaggtgtgagccaccgtgcccggccgccattttcaattctctccatttcctatagacagagattggtatcaagatggggttgttggggccaggcttctgggaagcatctgagataactagctacattgtattccttttccattgattagaagttagactctctggcttgagtctgactgtgtgtctttaggctggtcatgtaaactttctttgcctcga

SEQ ID NO: 96141 - DNA, 19007 bp, Homo sapiens
aggctggagtgcagcggtgctatcttggctcactgcaatctctgcctcctgggttcaagcaattctcctgcctcagcctcccaagtagctgggactacaggcacctgccaccatgcccagctaatttttgtatttttagtagagacagggtttcaccatgttggccaggatggtctcgatctcttgaccttgtgatccacccacctcagcctcccaaagtgctgggattacaggtgtgagccaccatgcccggccaatatagttattttgtctaaatagtgccagcgtgcattccaaactggctaggcatcccgtaaaggattcccagaaccctacaacctcctatatctctggcaacactcggcatgaactagtttcctaaattttaccagtctaatagctgtaaagtcgtatcttgtgagtacttcaatttgtatatttctgattactaataacttttcgaatgcttgctagcttcctgggtttcttttctgagacctacgtattcatatcttatgcatccccattttaagatgggaaacctaaagttcaggaaggttaaataattggtccaggatgatactgtgaatacatggtgtacctgggattcaaacccaggtagtctgaatccagagcccagattcttaaccacagcactggcctgcctaaacctctgcccctctgccctctgggcagcccctaagtgggcaacaagcaccctgaggagtccctttccaccaccacatgcaccttgaccaggccacggctgaagagcatctccacgatctccttgaggatgggcaggatgccgctatggtgcacacccaggccgcgattcaggagctctgacatgtgcaggacctttggtgggaggaggcccatggtcagggatggagtctcggaacaccctatccccaccagtctgccaaatgtgtgcatgcacgcacacagacgcacacagacgcacctggggcagctggcggtcagagccacggaggcgagcaaggcagcgctgcaggaagaggtggatctcgctcttctccgaactggtggtgaggtcaagggaggtgaggcctgaggcctgctcatcacagcggccccgggagaaggtgaacaccaccacgggcaactgggcacgtgtgcggagggaggccaggagggacaggtacactccgcggtcctggagaaggaaggggaaggggaaggagcagaggttgagttcctgaaccaatgagaggtgagctagtgttaactggggcagtgctcaaagctcaagtcaaaacccctgggggacaaggggaaaaaaaagataggaggaaaaacaggtgctggcaggtacaaaaccctcccagttctcacctgtgcagggcccccctgatgtgtgggctgcttggccccaaaggtctgggcgtgtttgctcattctctccttcttggcctccacagctgcatagtacctggggcacagggaggggtagccacaatgtccagctgggggcccagccctaactctttcccccatctcgaggcttacccttttgtatggaaggctcctcgggagtccagcaacaaaaagagctccccctgggtcttggagctgttccctgtgaaaagatagtgctccaggggcacggggcgggttacagtgctaatcacatagatctgacgacgcttcagccgcctgaagaaaggagagggaagcaggtcaggggtgggaacgtgggaaggaacccgcatccccacccccttccctacccctccaactttacccagtcttttctgagacccagaatggaaggctatcccccaacatctcatcccatttcaacatgcaaagtaatctggacccaaaggggatcccacagccaccaggtgggacatgttccccagcatcacccctaaggcctgaccgctctccttgctgtggtagacttagtcccccacccgaatcaaggagtactgtagcccccttcacccaggcaacccgggacacacgtctcacccaatccagtcagcaaactcaagggcgttggggacggtggcactcagaaggatgatagaaacgtggtcaggtagcatgataagcacctcctcccacacgaccccacgctgggcacagagagggaagggaggtcacatgagggcaggggccgcccttctgcccataaagaggcacaggattccatatgggggtaaagaaagcagtaaggggccctgagtgtgtggaataagggagacgctcaactggtcccaaaggagaggactgccgggttctggggagcccatggcccttacctcgacatcgttgatatagtgaacctcatcaaagatgacccactccaggtcccgaataacatctgagccactgtacagcatggagctggggagaagaggccaaggattgactccccagtggctcgtctccacccactcctcagacagcacactctccacaacggccacatcttcccagccaaaactcccctgtattgagtgtccatctctcaccgaaggatctctgtggtcatgatgaggcaggaggcctccggatgcagctgtacatccccggtgagcagccccacatccccgaatgtgtttcggaagtcccggaacttctggttgctcagggccttgatgggcgaagtgtagatggtgctgggaagagagcatgaagttagccagtccctccgcagactcatggcccgcacttcctctcccacatggagccctcgtggaagcatgccccagaagctcaggtgctcctcttcttcacccaaactgcccttacattctcctgcatgatataaccccagaaaaattctgtccccaaccccttcctaaactaacccaggtcattcttctaaactttctccccaccatgtcttttcatttctctctgggctcttgtctcagtcttagccctgaacctctcacttaaaggatgagctagagaggtgggggaagagatgagattttcaaaggatgcaggagaaaatggggctggctggtgaagggggaggttggcaaaggaactcataccgtgtcatgtgtttctgggccagggcaatggcatattcagccacaactgtttttcctgcagatgtgtgagctgcgacaaagacagagtcatgccgttccaagtgcaggatggcctgtttctgaaacacatctggctcaaatgcccactatgggagagagaaatagacaggagctgaagaaaggagcggggccttgctgcctcctgctcatggagcacgcagggcgggcggatgaaggccggagccagccgaggctgggactgagtaccaagactggcctgggatggatctgacctctggccaatagaggagacaaggggtcggctgggagtgtgacccagaaagaggtagaggagcgtgtgaagatggggccaaagtacctggaaggctggctggggaatgaggcgatagaaatcaccaacaggggaggtggcgtccacagggatggcccactgctcctgagatggaggctctggggcctctggggtggatacagctgtggacgcttcctggaagagtcaggggtagcagtgataaagatacaaccagagggctctcaattagcactcctcccaaaagatgtccctttcttcccctcagacccatcctagccagcccacatcctggtggcaaggctctttcttgcctccactacacagaaccaccaaccttcaacactaggtcttccaagctgcttgctcgggccaggggagcactgcagggagaggctgaaacagtgtcccctctgggacctcctggctgtcccactgcctcattctcatcctcgtcacccccacccaaatccagaggctccaacagacagctaaggcttagtagtccaggagctggagttggacaatctgaggagcaagccaacaaggtcaaccttgtcatgtccatctctgttccttaggagaaggacatgacttctcctacaccccactcaaaaactaaaactaaccttttggtgcaaagtccatgcctttcttgaaaccaggtggaatagtaagaagatctgtaggatagggacatggaatcaggtcactgcacactggtgaacaaattgtgtacattatataaacctaaaagataccatttacaggacagatgctgtagatagggatgtttgctatgacactttcccaacagatgacagtaaaggttgttgtagaaatttcccagcagatgacagtaaaggttgttatggacagaatatctttttctaattttctcaaaaacatgggagggctagcagtagcccagtgatagcctgggctcttcctcctcaaggctcagactcagagccccaccttacctttctcaaagtctatctcctcctcagcctcctcccgtgtgttcagatctgttatggtgggttcatccatcccccctgggaagagacaggacagacagggattcatgggatgagggtaatacgagataggtggggaacccttccctggagattaaagacaccctcttctaccatcccatctccacaagagtcacctggccagaagggatactgagttggatttccccataaggactgggaggctggccctggaggccggcgaagagacaaggaggttgtagccgagagatttgtgttctccagcaagacctaaggcaagagatcagagccccaatgaggctgagcttgtctctgaccacctccccttctccccaactgtttctcatgacccctgacctcctacctctttgtaacccagtatctggcctgtggttgggtgtctttgggcctgtaggtcggatgggactggggctcccaggacagccaaaagagaccagggatccgtcttcctctgccattttctggagagaaaaatagtaacttttgggtcttctttcttcctctgtcccagcttccttcaggaacccatcaccctagtctaagcccctccagactcctcaccgggctgagtgctccacaccatgcagaggcagccaggctggggatgacagaaacaactgttctgcttcttgctgcagatctggggcacaaggagggaggccatggggaagctgaaacaagggcaagatgagaggcattaggtaaggaaagaggataaaatgcagacaaaagagatgatgggacttgtgttcagatcagaaatggcagatgtgtcaaacagactaggacaatcaggcttggccaaaaactacctgctactgaattacctggggcagattttggatttcagaaacatggaggctggacctaggaatgtgcatttttaaaaagctccctggctaatcatgaagcacactgaaattggagactcactgattttagaaaaaggggtcccagacctaaggatgaaaggttggaggctcaaagcctatcatctcagtcaccaagtgccctggtgcttggatacagaagggagctccacggagaaatgccacatttgaaagagcagctctcaaagcaaaaatatccccagccctttctgctctgtcctcacacgtactgcaggtacactgggctgtaatctgtccagcaccccttcaggctgggatggacaggagtacaggcacagatgaacaaggttaagctagatcctactgtgaggagggtgaaggaggtttggactcaatgcgggtcaaaggttagggtcaaaagtcactcacgctactctctggagctccaggcaagttcagcagctcccagtgccccgtgcatccgagctccacggcccgaaggggtaggtccaggggatctggagggggtagcactacggggaaaggtcaaaagtcaggggtcaaagttcattccatatcggctactccgttccatttccctcccctccccctcaccaagtcgctctgtctccatcatcctggagccacagcagctgcctggcagcccggaagtgcggcaagtagtcgctgcgaagtaagccccgccccggaacgggcggaagtagaggcaacttccggtacagcccygccgagagcgtgaactatcgctgcggaggggcagacctggaccggtggaaggccgggcggaagtgcgcgcctggggccgccttggttaccgcgttttccgctcctcgctacgtcatcgttgtgagcccgctatcagcrgccagcgcgggcgcggccggagaccgtggggmccccggttgccgccccctcgggtaaggccctctgcttctcactcttcggccctttttctcatagccgtttctctgttcttcctctttgcrttgctctgcgggcgctacgctggctccaccgccttctctgccgttcaaaccccgcggttgtccttaccctagcgagggtaggggggtcgggtgccatcgtctttccgacggagtggatatttgtccctccttgaaccacatggtacctaaaggtgctggtgtctgtgatccctggagacaggagggaatgctggatgatcccgaccagcgggagcttggacagcagcctggtttaagcaaggggtagggaaagccaaagacaagagtaggcagacctgaaggggtggggttgggtacagtgtggacggcgtgtgaaccccgggtggtaacagtggagaaagatgtcttgggccctgcccctgaactaggagccaccatgttggtgataccccccggactgagcgaggaagaggaggctctgcagaagaaattcaacaagctcaagaaaaaggtgagggactgtgtgtggacatggcctaacctttcacagactctgcactctgagaagatatggggtgagtgtgagcgaatggggaagtttttctggcccatacctagagacatatcacctcacagtgtagcttcgagaggtgggctttcccaagccttggtgtggaccttctgtcttttctatgcaatttgccatggattgtcttcctttcccatggcttttagtaccgcttaagagctgatgatccccaagtttgttttttccagttctatccagtgttatactgaaaaacttcagatactcagtgttgaagctatcatctttctattcttgatcttccaaataagattgactacaccaattctgccacatgtttggactcaaaactctgacttccccactatttgcatagtcaaacctttgccaagtcttattgtttcttcttttgaagkaatttttcctgtttattcttcactgtgcattcccccgagcagggctttattgacattcatgtgggccattgtaatggtctctcaacaaatttctcagtctttttttttgaacagacttcttcactcctgttcaaatgatccattgaaaacacaaaattctgctccctctgtttctcaaaaaccataaatggcttcacattgtctataaaaaagcctcaaaaccttagtttggcagccttgtctagtaaagtagaactattcactacttccaaaagatgcattcccaaagccttcttatctctgcatctttgccaccctgttttctttttctaaaatacccttctcctctctgtgttgtgcagagatacgggagagggcctagtttaatagccattaaacatcagaaaatcttactagctttcagctatgaataatctgcacctcttataattgtattgctaactcaatgtattttatttctcagactgtaagcttcttgagggtaggaacaatgcattagcctcctggatatccctgttacgaagtcatggctgggcctcattcaatatgcaggaaatagatggatgaagcttccaggaaaggcacataaacttatacttacttgcagcttatatcctaggattctagtccatgattgagttatttgtcttcaacttcaaaaatgtaacactctggaaaacctctgggttccgtggtttggttagattaggaatttccagcatcatacatgatctaggggaccagaggcaagaggcagagcacatcagtgtaccactctgagggcatcaagaaagayggtccctggagtgatgtgcccaggggccttaggagaggaaccggctaggggctggccctcacttacctctctcttctcacccttgttcccagaaaaaggcattgctggctctgaagaagcaaagtagcagcagcacaaccagccaaggtggtgtcaaacgctgtgagtgacaggggaaatggggatggactggaagtgggcagcatggagctgaccttcatcatggcttggccaacataatgcctcttccccttgtctctccagcactatcagagcagcctgtcatggacacagccacagcaacagagcaggcaaagcagctggtgaagtcaggagccatcagtgccatcaaggctgagaccaagaactcaggcttcaagcgttctcgaacccttgaggggaagttaaaggtgagcacaagcagaaagattgtttaaagggcatccctccaagttggaatgtagatgggtttggggaaaaatatgcatactcaagcactggcaaattgctgtaccattctgagtttcacctctcatgtataaaatgaaaaaaytagacgactcctgaattctccattttacaaattctgtggttctaatccaccttggattggagctcttggaatatgttgccctaagggatggaaagggctgaaaatgttatcaggttcaagagaggttcaaataaactgaatacataatatatcgagtcacttataaaaaataccagctgggcgtggtggctcatgcctgtaatcccagcactttgggaggctgaggtgggcagatcacttgagattaggagtttaagaccaacctggccaacatggtaaaaccccgtctctactaaaaatacaaaaatcagcagggtgtgaggccgggcrcggtggctcacacctgtaatcccagcactttgggaggccgaggcaggcggatcacgaggtcaggagatcgagaccatcctggctaacaaggtgaaaccccatctctactaaaaatacaaaaattagccgggcgtggtggcgggcgcctgtagtcccagctacttgggaggctgaggcaggagaattgcttgaacccaggaggcggagcttgcagtgagtcgagattgtgccactgcactccagcctgggtgacagcgagactccgtctcaaaaaaaaaaaaaattagcagaatgtggtggtgcacacttatagtcccagttactgaggaggctgaggccagagaatcacttgaacccaggaggcagaggttgcagtgagtggagatcacaccactgcactccagcctggacgacagagcaagattctgtctcaaaaacaaaacaaaacaagccacaatggcaggtgcggcaatggctcattcctggttaatttcagcactttaggaggccgaggtaggaggattgcttgagcccaggagtttgagaccagccctggcaacatagtgaaaccctatctctacaaaaaaaaaaaaaaatacagaaattagccaagcatggtagagcacatctctagtcccagctactagggaggctgaggtaggaggattgcttgagcatgggaggtcaaggctgcagcaagctacgattgctctattgcactccagcctggacaacagagcaggaccgtgtctcaaaaaaaaaaaaaaaaaataagtaaaaccacgtcaaataagaaatgtatgtagaattaaaagggaagaaaagatcagaggaaacctagaagagggtgagggaagaggaacacctctggtccatggttgggcaacctcctgctccacactgaggtaggtctytcaccactccaggaccccgagaagggaccagtccccactttccagccgttccagaggagcatatctgctgatgatgacctgcaagaggtaaaggctcctaatttctgtccctgaggggttggggatggaggaatatgagagacaaatatattttggaccacatgtcagcaactggaaatcatcttaactgttcttggtctcttttacagtcatccagacgtccccagaggaaatctctgtatgagaggttagagagtagagataaggctgggcccatttggtggagttgattgcctgagtccttgggaggtttgggctgtaggagctgggctatagagggaatattgagtctccacagggtctgaggggagaaggtaaaacccccctttgatcttcagtctgcatctccccagctttgtgtcttctagtgatcgacttcgagaactaggaccagatggagaagaggcagagggcccaggggctggtgatggtccccctcgaagctttgactggggctatgaagaacgcagtggtgcccactcctcagcctcccctccccgaagccgcagccgggaccgcagccatgagaggaaccgggacagagaccgagatcgggagcgggatcgagaccgggatcgagacagagacagagagcgggacagggatcgggatcgrgatcgagatcgagaccgggaacgggacagggatcgggagcgggatcgagaccgagaccgagagggtcctttccgcagtgagtgattttggctggaggtcaaggtgaccttaactgaggtttatgtgggtcctactaagtgaaatgtggcatggkctatgtcttgtgactatgatttgtgctcccaaagggtcggattcattccctgaacggcgagcccctaggaaagggaatactctctatgtatatgkagaagacatgacacccacccttctccgtggggccttctctccttttggaaacatcattgacctctccatggacccacccagaaagtaaggatgacaacagggcatgatgagaagtcctgggagaatcctggggtgtgagacctgagggaagaagctgccctccctgcagccgcctattatcactgggtttggttgggtccagaagagccccttggctctccactgaccgtgttttctcttatcccagctgtgccttcgtcacctatgaaaagatggagtcagcagatcaggccgttgctgaggttggaacttcccaaatctgttcttcccatcgcttctgctgttctcatgtgttctcctcaaaatactagatgccaggaagaagttggttcctcttgataaagaaagcctctccctattcacacagaaaaactcacattctcagattccttattcagtctcctcctaggatagcaactcctggaataacttctttggtttatctgtaatgttttcctccccatcctctgcctcccctcttctgcttcagctcaacgggacccaggtggagtctgtacagctcaaagtcaacatagcccgaaaacagcccatgctggatgccgctactggcaagtctgtctggggctccctcggtaagaatgggattcttccyttcccatcctytcccccacaggccattccttttggttcccccacacatccttgggtttcctagagatgatcgaggtcagagtgtgtgcggaggctatgggaatgggaaggaaaatttcagatcctctgtcagttagaggtaaagaaaggagagaaaaggattgaaaacagcttccaaagcagtgactggaacagggaagaaagtgggagctggagtgagattggtgaggaagatgagtgtctcatggggcttgttcattttgagatggagtagagtgagtttcataagtattcgaaatcagggatctggaactcaggtgtgaggtaaggaaggaaaacatagattaagtcatccacatcacagggtggctgccaaacaataggatcatcagggagactctgatttcagagaaaaaaaaacgacccaggactcagtttgaggagtactctgggactatgttaggaaacaggactgttcacctcacaccccacatgtccccagctgtcctgacatgttaggctaacgttgagcctaacgttagcaaaggagacaggaggaggggtcggagggctgggagcagcaccgcaggggcctgggccactgaagcaaaaggacacacactttgagaaagagggagtagccagcagtgttgaggcacagagatcacaggatgggagtgggtgagagagattctctgtagctcaagggtggtggggatggaaccattggatggggtgaagagagtaacatgtctggtggagggaggaaagaggaaggggaagaaacagctagaggcttragagagaatggtgagggccaaagctacaccctgaatgagttctggtggagctagtagcatttcttagtgtgaataatccattttccctgaaagtagattttcctgggaaaggagtgagcagaaagaagggctcagctacagtggcccttcaggcaaaagaaaggaactagaattgaccagcatgtcaaaaaagggctacagaggttttctagtttttagcttctgacatactgactgtaagtagtgggttaatatcattcacgtgtctcaacaatgacatttgggatttttctaagaacaaaacattcatcaaaatgtccacttatacttttcttggccatgggttggcacaaaggagctaaggaagacaggccatcctggccaccagagggcagcgtggaaactgggcttccaggggccagtggccaggagtgaggtggtcaggagtcagcctcagggtctgttctrtgatctcctttagaccttaactgttcctctcctccctccctagctgtccagaacagccctaagggttgccaccgggacaagaggacccagattgtctacagtgatgacgtctacaaggaaaaccttgtggatggcttctagggaacagagctggattccttgtgcctcatatgccccaatgctggtctcagtaaaacactgaggtggaagcttacacatctccctcagcctctggtttttcascacttgggattggggttaarcctttaaaaacrgctgtcaggtttgatctcagtgtaacracatggccagtgcctgttccccactcccttgccccaaaaggatctggaacacaggtgttgtcgcagctgttttaattcaatcccacgcccctgtccagcaggaaaccccttatagaaaacccaaatcctcatcttggagtttctccttcagccagggcagcacttgaaagaggttgatgtgaaagtctcgggcgtgagcrggtacctgcttttgccgcttctggtttttgcagacatccactactccccagctgattacaccaacctgcagaggcagtggggtgccatggatcattcagtagaattcctaatcctggaagcatggctgttcctgcttgcgtcttagctgacctaaaggaatcagactagggacccagctcagcctcgttcttgacacacgcaggcaagacatgcggtcctaaggtgaggcaggctctgcctacctcgaattactagccacatgcattgagctttcctgctttggggcccatgctgaccacttggcatctccccagataggaaagggaggactcacttgaatgaaacgacttctcttgtgaactatcaaggggccgccagaatcacctgcaaggagagsagaagctgtagagaaaaggactgttgggccttgggcacttgtagcacraccaaagagcattctctcacctctgcaagtattggggtcagcatagggactcactcctccagtacaaaggaaccgaggggtgaccacctctgagatgtccttgactttgtcatagcctggggcatattgagcatctctctcacagctgcctttctgtaggggaggtgggaagcatggagaagtaatgaacagaagtggcttaggaaggattggggcctagagtgcctccttaggatgcccgtttctcaccttatccccattcttgatgtagacctccttccgagtcagctttttctcctcctcagacacaaacagagctttgatatcctgtgcagggagcagctcttcctctggacgaatagactgcgtcacttcagctgctcccaccactgtcatctccccattgcctttgtcactcagtagatgtcccctaagcccttctagagctaggttctgggccaggcatcatctcttcctattgcacctccctctcatgccccacttgtctcttgggatctcatccttatcctcttgccaagtatgtcttactttgttgctggcaagtggtagttggaggaagcctcaaagctcgagttgttccctcggtgcaggggagacaaatgggcctataaaggacaaggagaacagcaaaccaggcctgctcctcaccccagtcctccagcctttcccagcctttcctcagggatctggacgctctcacctgatagtctggccatatttcagcttattcttgagcttgatcagggcaacgtcatagtcataaaattcaggaattcctgctkcttytttcccattaatgttgtagttrgggtgaaataggactacttctatctccaggtcccgcttctcccctcctgaagtaggagagtaggtaccacctctttgtgggcagcttcctgcctctggccccgtgtcattcctaacttcacgtcttcccccatccctgactggtctggggtgcaaggaatggggctgcattgaggatgggtggagtgtaggatctgtagaaagtgggaggtgttgcctggagagcataggtgcagcccaggaccttcagttgcatccttacctacgctgaccttgattgagtgttccttgtcatccacagtgaaacaatgtgctgctgtcagcacaaagtactcagacaccacagcccccatacagctctcgtgtccctttgaagggcgctggggacacaacagtagagagggaaagctcaactttcacaaaccaccatctcttatggccattttttccttcccctactcccatttcaccttgacctcacctcccccaagtccccactactgggattctgtgcttacaatgactgagatcttggcctgccatggttgcttgtggtaatcggtacccttcctgtgttcccaaaccatgccacagagactcagagactggctttcatctggcagagaaggagaatgtgctgaaaactcggaacacttcattcccaaatggcagcagccttttgggtaggagtctatggggagcaaaggcccaaaaggagaaagggaaagaccacgggtatttgtttcctcgtgttaggagaaaactgctatggtggactgaaaagggaaagaacttgggatcaagctgtcagaggcctggctgttttcaagcccacccttgttgctaacttgctgtcccttgacctcctttggcttctgtttccacgtgtcaaatgtaggactatagaaagatctctgaagtgctcagagctctgtgattctaaggttaagtgaacagtgccaggaaacaagaatagtgacactgaggtagagaaggaggaatgaagaaggctttccaggcaactagagcttcaggtgtagaggaagaatgaattacttcaggggaacctgaggagagttgtgttctttattcccttgtatctccctaccgatcatttggtagaaaacatcttccaggttttccatatccttractttgaacacatgttgctcattgtctttcttggaagccaaagcattgatgttcacttggttcaccaaaggcccgaccccaaacacatagacatctgagggataaaaaggaaggatgagggtccaagccctgaggaagtggggtgctgggtcctaggcaggttactcacccagataatcctcccttgggtttttgcgatccttgccaatgtatagcaagtcccggatctcatcaatgacagtaattgggtccccgcccatgttgtgcaatcctgcagaagagacaggaccatgagggtaggagataaggaagataaactggctaaaggcagggatacacatggcagggtgagcaagttgaggaagggttagagatagttgatcacagggcttaggaagaattccttatgaagggtcacaggagagatgaacagccagctatgagtcacattcagggccccaaccatgggtatagtgttacaagtggacttaagggccacatgctggtctgagaaggtggggaggctgggacaggagagaggtcccttctgaccatcagtcatgaggatgatgacatggcgggtgcggttccagccttcaggagggacgtcatctggccagctcatmatgctgtacactgcctggagggccttcttggtgttagtccctgacttcaacttgtggtctgtggagagggaagagaccatcacctcacctggtcttccaagccatcttttaaccccagagaccaatctgcaactgaaatcccacatctttcaactttttaagttaatcatcattacacggacttccctttgaccacaaagtggcccttccagcccccaacaggttcccactaacctccattgcccaacgatcctgctgttcaacctttgactacaaagtggtcctccctgtcgccctcaaggtagtctcatgaccccctccaccctgaacctcctgaccccaaagtgaacctcccaccattccctaacctctgaccttcataattgatttcattgagctgcttcgtgacccagtctgcattactgctgtctgcttcagacactttgacccaaattttggggtatgtggcatatgtcactagaccatatcttggcttcacaccataacttgccacctgtgggtgaggagaacaaggcgccatggcattgaaaatagaatactgtgattgggagatttcagcgactttgctgggacagggaggctctcagtaagaggctcaagggctgaggttcatggaggaattaccagtcaagaaactgcttcaagtaaaagggaaggaggacagaataggacctggagattttcctggggccctgttgttcagaggggctggaatgatcagggagctagtcctggaagatcagcgagattccattcccccgagttcagggataggaggattccaccttctcaattaagttgactagacactttttggctcctgtgaagttgctggccccaatgctgtctgatccatctagcaccaggtagatgttcatggagcctgaagggtccaggacgatcttccgcttctgttgttcccctgggtgccaggagagtggctcaggctccagcattaacagttctgtcccttctccattttcccccagttccctgccctgcctcccttctctgtcttcaaacctgggcygtgcccatcctcagcatcgactccttctatggtctctgtcagggaagacaggaaagcttcggccacctcttgaggggtgtcrtacatgaaggagtctgggagagtcagaaatgaggtcaaatgtctgggagtgtcagggatacagtgaccaaagagacgggggatcatgggtttccagggtataaaaggctcagaagtgagatagttgtacagggaggtttaaacaaagtgaggaaagagcagggttgaggtggggagagaagacagtaggatggaagaccaggatctgacctgggggtacaggtcaaaggtcaccttggcaggaaggctccgtcccgctccaagagccaccttcctgacacgttcgccgctgggagccacgcagggtaagcccccggctgcagtggtaggtgacgctgtcttcaaggcggtactggctgcccaccttccttgtgccaatggggatgcccgggttggagcagtaccccgctgcagaggtatgagacatcgaggtaagcactgaagcctgaggccccgtgagcaaggtagagagcaagagttacagtgtccggagccgagtgcccactcctcgggctgggcgccgtcagggagacagcaatgtagggggaggggatgcttctcacctccgttgtcacagatcgctgtctgcccactccaycggccattcacttggcaggtgcgattggcagagccccggagagtgtaaccgtcatagcagtggaaagagatctcatcactcacattgtagtagggagaccggggccagtattccccgttctcgaagtcgtgtggtcttggacagtggattgctttgagaaggggggacaagtagaagtcatcaagagggaaaggctgccttaggtgtatccctcctggtctcggagaccatgtcactgagaaacagcgcattcccagtcccgcagaagcagcatcttacctactcctcaacccatatggatttccactgcttctccctccccatttctgagtgttctcttgacttccagggctgcctggaagcccagggtaaatgcttagtaagggttaactccgctttttcttgccccctttccgcctgccaccctaaaactgctcctactcccggtcagcccaccttgtcaccctgcctagtctcatcctagtcctgaccttgctgccgcctgccctgtttctgccttaggccactgcccacactcattgccctcaaacctctgcactctgccttcctgacagtcttttggtcttgagtcttcagggtgctccaggaccccgtagatctgcaggtacgtgtctgcacagggtacgggtagaagccagaaggacacacgtactccagtgcctggccctcttggagaagtcggaaggagccgcctttgatctctaccccctccagagagcaggatccctggggcyrggccaaagaccatggagtggtggtcacacctgaagagaaaggctgatgaagcctggccccaaaaggccaaggagggatgctggagacagcaggaagggaaggttaccctcgcttacctccagacaagaggcccaagataaagggcatcaggcagagttgggggctgagattgctccccatggcgttggaaggcaggagagaagctgggcctggggcaggatggtgtgtcctggcttgctttgcttgtctgcttggctcagtgtccaagctgaaactccagacctagacctggtcacattcccttcccctgctcccc

SEQ ID NO: 96142 - DNA, 23248 bp, Homo sapiens
  misc_feature (1)...(23248): n = A,T,C or G
caggaaaatctactttcagggaaaatggattattcacactaagaaatgctactagctccaccagaactcattcagggtgtagctttggccctcaccattctctctcaagcctctagctgtttcttccccttcctctttcctccctccaccagacatgttactctcttcaccccatccaatggttccatccccaccacccttgagctacagagaatctctctcacccactcccatcctgtgatctctgtgcctcaacactgctggctactccctctttctcaaagtgtgtgtccttttgcttcagtggcccaggcccctgcggtgctgctcccagccctccgacccctcctcctgtctcctttgctaacgttaggctcaacgttagcctaacatgtcaggacagctggggacatgtggggtgtgaggtgaacagtcctgtttcctaacatagtcccagagtactcctcaaactgagtcctgggtcgtttttttttctctgaaatcagagtctccctgatgatcctattgtttggcagccaccctgtgatgtggatgacttaatctatgttttccttccttacctcacacctgagttccagatccctgatttcgaatacttatgaaactcactctactccatctcaaaatgaacaagccccatgagacactcatcttcctcaccaatctcactccagctcccactttcttccctgttccagtcactgctttggaagctgttttcaatccttttctctcctttctttacctctaactgacagaggatctgaaattttccttcccattcccatagcctccgcacacactctgacctcgatcatctctaggaaacccaaggatgtgtgggggaaccaaaaggaatggcctgtgggggagaggatgggaarggaagaatcccattcttaccgagggagccccagacagacttgccagtagcggcatccagcatgggctgttttcgggctatgttgactttgagctgtacagactccacctgggtcccgttgagctgaagcagaagaggggaggcagaggatggggaggaaaacattacagataaaccaaagaagttattccaggagttgctatcctaggaggagactgaataaggaatctgagaatgtgagtttttctgtgtgaatagggagaggctttctttatcaagaggaaccaacttcttcctggcatctagtattttgaggagaacacatgagaacagcagaagcgatgggaagaacagatttgggaagttccaacctcagcaacggcctgatctgctgactccatcttttcataggtgacgaaggcacagctgggataagagaaaacacggtcagtggagagccaaggggctcttctggacccaaccaaacccagtgataataggcggctgcagggagggcagcttcttccctcaggtctcacaccccaggattctcccaggacttctcatcatgccctgttgtcatccttactttctgggtgggtccatggagaggtcaatgatgtttccaaaaggagagaaggccccacggagaagggtgggtgtcatgtcttctmcatatacatagagagtattccctttcctaggggctcgccgttcagggaatgaatccgaccctttgggagcacaaatcatagtcacaagacatagcccatgccacatttcacttagtaggacccacataaacctcagttaaggtcaccttgacctccagccaaaatcactcactgcggaaaggaccctctcggtctcggtctcgatcccgctcccgatccctgtcccgttcccggtctcgatctcgatcccgatcccgatccctgtcccgctctctgtctctgtctcgatcccggtctcgatcccgctcccgatctcggtctctgtcccggttcctctcatggctgcggtcccggctgcggcttcggggaggggaggctgaggagtgggcaccactgcgttcttcatagccccagtcaaagcttcgagggggaccatcaccagcccctgggccctctgcctcttctccatctggtcctagttctcgaagtcgatcactagaagacacaaagctggggagatgcagactgaagatcaaaggggggttttaccttctcccctcagaccctgtggagactcaatattccctctatagcccagctcctacagcccaaacctcccaaggactcaggcaatcaactccaccaaatgggcccagccttatctctactctctaacctctcatacagagatttcctctggggacgtctggatgactgtaaaagagaccaagaacagttaagatgatttccagttgctgacatgtggtccaaaatatatttgtctctcatattcctccatccccaacccctcagggacagaaattaggagcctttacctcttgcaggtcatcatcagcagatatgctcctctggaacggctggaaagtggggactggtcccttctcggggtcctggagtggtgagagacctacctcagtgtggagcaggaggttgcccaaccatggaccagaggtgttcctcttccctcaccctcttctaggtttcctctgatcttttcttcccttttaattctacatacatttcttatttgacgtggttttacttattttttttttttttttttgagacacggtcctgctctgttgtccaggctggagtgcaatagagcaatcgtagcttgctgcagccttgacctcccatgctcaagcaatcctcctacctcagcctccctagtagctgggactagagatgtgctctaccatgcttggctaatttctgtatttttttttttttttgtagagatagggtttcactatgttgccagggctggtctcaaactcctgggctcaagcaatcctcctacctcggcctcctaaagtgctgaaattaaccaggaatgagccattgccgcacctgccattgtggcttgttttgttttgtttttgagacagaatcttgctctgtcgtccaggctggagtgcagtggtgtgatctccactcactgcaacctctgcctcctgggttcaagtgattctctggcctcagcctcctcagtaactgggactataagtgtgcaccaccacattctgctaattttttttttttttgagacggagtctcgctgtcacccaggctggagtgcagtggcacaatctcgactcactgcaagctccgcctcctgggttcaagcaattctcctgcctcagcctcccaagtagctgggactacaggcgcccgccaccacgcccggctaatttttgtatttttagtagagatggggtttcaccttgttagccaggatggtctcgatctcctgacctcgtgatccgcctgcctcggcctcccaaagtgctgggattacaggtgtgagccaccgcgcccggcctcacaccctgctgatttttgtatttttagtagagacggggttttaccatgttggccaggttggtcttaaactcctaatctcaagtgatctgcccacctcagcctcccaaagtgctgggattacaggcatgagccaccacgcccagctggtattttttataagtgactcgatatattatgtattcagtttatttgaacctctcttgaacctgataacattttcagccctttccatcccttagggcaacatattccaagagctccaatccaaggtggattagaaccacagaatttgtaaaatggagaattcaggagtcgtctagttttttcattttatacatgagaggtgaaactcagaatggtacagcaatttgccagtgcttgagtatgcatatttttccccaaacccatctacattccaacttggagggatgccctttaaacaatctttctgcttgtgctcacctttaacttcccctcaagggttcgagaacgcttgaagcctgagttcttggtctcagccttgatggcactgatggctcctgacttcaccagctgctttgcctgctctgttgctgtggctgtgtccatgacaggctgctctgatagtgctggagagacaaggggaagaggcattatgttggccaagccatgatgaaggtcagctccatgctgcccacttccagtccatccccatttcccctgtcactcacagcgtttgacaccaccttggctggttgtgctgctgctactttgcttcttcagagccagcaatgcctttttctgggaacaagggtgagaagagagaggtaagtgagggccagcccctagccggttcctctcctaaggcccctgggcacatcactccagggaccrtctttcttgatgccctcagagtggtacactgatgtgctctgcctcttgcctctggtcccctagatcatgtatgatgctggaaattcctaatctaaccaaaccacggaacccagaggttttccagagtgttacatttttgaagttgaagacaaataactcaatcatggactagaatcctaggatataagctgcaagtaagtataagtttatgtgcctttcctggaagcttcatccatctatttcctgcatattgaatgaggcccagccatgacttcgtaacagggatatccaggaggctaatgcattgttcctaccctcaagaagcttacagtctgagaaataaaatacattgagttagcaatacaattataagaggtgcagattattcatagctgaaagctagtaagattttctgatgtttaatggctattaaactaggccctctcccgtatctctgcacaacacagagaggagaagggtattttagaaaaagaaaacagggtggcaaagatgcagagataagaaggctttgggaatgcatcttttggaagtagtgaatagttctactttactagacaaggctgccaaactaaggttttgaggcttttttatagacaatgtgaagccatttatggtttttgagaaacagagggagcagaattttgtgttttcaatggatcatttgaacaggagtgaagaagtctgttcaaaaaaaaagactgagaaatttgttgagagaccattacaatggcccacatgaatgtcaataaagccctgctcgggggaatgcacagtgaagaataaacaggaaaaattacttcaaaagaagaaacaataagacttggcaaaggtttgactatgcaaatagtggggaagtcagagttttgagtccaaacatgtggcagaattggtgtagtcaatcttatttggaagatcaagaatagaaagatgatagcttcaacactgagtatctgaagtttttcagtataacactggatagaactggaaaaaacaaacttggggatcatcagctcttaagcggtactaaaagccatgggaaaggaagacaatccatggcaaattgcatagaaaagacagaaggtccacaccaaggcttgggaaagcccacctctcgaagctacactgtgaggtgatatgtctctaggtatgggccagaaaaacttccccattcgctcacactcaccccatatcttctcagagtgcagagtctgtgaaaggttaggccatgtccacacacagtccctcacctttttcttgagcttgttgaatttcttctgcagagcctcctcttcctcgctcagtccggggggtatcaccaacatggtggctcctagttcaggggcagggcccaagacatctttctccactgttaccacccggggttcacacgccgtccacactgtacccaaccccaccccttcaggtctgcctactcttgtctttggctttccctaccccttgcttaaaccaggctgctgtccaagctcccgctggtcgggatcatccagcattccctcctgtctccagggatcacagacaccagcacctttaggtaccatgtggttcaaggagggacaaatatccactccgtcggaaagacgatggcacccgacccccctaccctcgctagggtaaggacaaccgcggggtttgaacggcagagaaggcggtggagccagcgtagcgcccgcagagcaaygcaaagaggaagaacagagaaacggctatgagaaaaagggccgaagagtgagaagcagagggccttacccgagggggcggcaaccggggkccccacggtctccggccgcgcccgcgctggcygctgatagcgggctcacaacgatgacgtagcgaggagcggaaaacgcggtaaccaaggcggccccaggcgcgcacttccgcccggccttccaccggtccaggtctgcccctccgcagcgatagttcacgctctcggcrgggctgtaccggaagttscctctacttccgcccgttccggggcggggcttacttcgcagcgactacttgccgcacttccgggctgccaggcagctgctgtggctccaggatgatggagacagagcgacttggtgagggggaggggagggaaatggaacggagtagccgatatggaatgaactttgacccctgacttttgacctttccccgtagtgctaccccctccagatcccctggacctaccccttcgggccgtggagctcggatgcacggggcactgggagctgctgaacttgcctggagctccagagagtagcgtgagtgacttttgaccctaacctttgacccgcattgagtccaaacctccttcaccctcctcacagtaggatctagcttaaccttgttcatctgtgcctgtactcctgtccatcccagcctgaaggggtgctggacagattacagcccagtgtacctgcagtacrtgtgaggacagagcagaaagggctggggatatttttgctttgagagctgctctttcaaatgtggcatttctccgtggagctcccttctgtatccaagcaccagggcacttggtgactgagatgataggctttgagcctccaacctttcatccttaggtctgggacccctttttctaaaatcagtgagtctccaatttcagtgtgcttcatgattagccagggagctttttaaaaatgcacattcctaggtccagcctccatgtttctgaaatccaaaatctgccccaggtaattcagtagcaggtagtttttggccaagcctgattgtcctagtctgtttgacacatctgccatttctgatctgaacacaagtcccatcatctcttttgtctgcattttatcctctttccttacctaatgcctctcatcttgcccttgtttcagcttccccatggcctccctccttgtgccccagatctgcagcaagaagcagaacrgttgtttctgtcatccccagcctggctgcctctgcatggtgtggagcactcagcccggtgaggagtctggaggggcttagactagggtgatgggttcctgaaggaagctgggacagaggaagaaagaagacccaaaagttactatttttctctccagaaaatggcagaggaagacggatccctggtctcttttggctgtcctgggagccccagtcccatccgacctacaggcccaaagacacccaaccacaggccagatactgggttacaaagaggtaggaggtcaggggtcatgagaammagttgggkagaaggggaggtggtcagagacaagctcagcctcattggggctctgatctcttgccttaggtcttgctggagaacacaaatctctcggcyacaacctccttgtctcttcgccggcctccagggccagcctcccagtccttatggggaaatccaactcrgtatcccttctggccaggtgactcttgtggagatgggatggtmgaagagggtgtctttaatctccagggaagggttccccacctatctcgtattaccckcatcccatgaatccctgtctgtcctgtctcttcccaggggggatggatgaacccaccataacagatctgaacacacgggaggaggctgaggaggagatagactttgagaaaggtaaggtggggctctgagtctgagccttgaggaggaagagcccaggctatcactgggctactgctagccctcccatgtttttgagaaaattagaaaaagatattctgtccataacaacctttactgtcatctgctgggaaatttctacaacaacctttactgtcatctgttggraaagtgtcatagcaaacatccctatctacagcatctgtcctgtaaatggtatcttttaggtttatataatgtacacaatttgttcaccagtgtgcagtgacctgattycatgtccctatcctacagatcttcttactattccacctggtttcaagaaaggcatggactttgcaccaaaaggttagttttagtttttgagtggggtgtaggagaagtcatgtccttctcctaaggaacagagatggacatgacaaggttgaccttgttggcttgctcctcagattgtccaactccagctcctggactactaagccttagctgtmtgttggagcctctggatttgggtgggggtgacgaggatgagaatgaggcagtgggacagccaggaggtcccagaggggacactgtttcagcctctccctgcagtgctcccctggcccgagcaagcagcttggaagacctagtgttgaaggttggtggttctgtgtagtggaggcaagaaagagccttgccaccaggatgtgggctggctaggatgggtctgaggggaagaaagggacatcttttkggaggagtgctaattgagagccctctggttgtatctttatcactgctacccctgactcttccaggaagcgtccacagctgtatccaccccagaggccccagagcctccatctcaggagcagtgggccatccctgtggacgccacctcccctgttggtgatttctatcgcctcattccccagccagccttccaggtactttggccccatcttcacacgctcctctacctctttctgggtcacactcccagccgaccccttgtctcctctattggccagaggtcagatccatcccaggccagtcttggtactcagtcccagcctcggctggctccggccttcatccgcccgccctgcgtgctccatgagcaggaggcagcaaggccccgctcctttcttcagctcctgtctatttctctctcccatagtgggcatttgagccagatgtgtttcagaaacaggccatcctgcacttggaayggcatgactctgtctttgtcgcagctcacacatctgcaggaaaaacagttgtggctgaatatgccattgcyctggcccagaaacacatgacacggtatgagttcctttgccaacctcccccttcaccagccagccccattttctcctgcatcctttgaaaatctcatctcttcccccacctctctagctcatcctttaagtgagaggttcagggctaagactgagacaagagcccagagagaaatgaaaagacatggtggggagaaagtttagaagaatgacctgggttagtttaggaaggggttggggacagaatttttctgggrttatatcatgcaggagaatgtaagggcagtttgggtgaagaagaggagcacctgagcttctggggcatgcttccacgagggctccatgtgggagaggaagtgcgggccatgagtctgcggagggactggctaacttcatgctctcttcccagcaccatctacacttcgcccatcaaggccctgagcaaccagaagttccgggacttccgaaacacattcggggatgtggggctgctcaccggggatgtacagctgcatccggaggcctcctgcctcatcatgaccacrgagatccttcggtgagagatggacactcaatacaggggagttttggctgggaagatgtggccgttgtggagagtgtgctgtctgaggagkgggtggagacgagccactggrgagtcaatccttggcctcttctccccagctccatgctgtacagtggctcagatgttattcgggacctggagtgggtcatctttgatgaggttcactatatcaacgatgtcgaggtaagggccatgggctccccagaacccggcagtcctctcctttgggaccagttgagcgtctcccttattccacacactcagggccccttactgctttctttacccccatatggaatcctgtgcctctttatgggcagaagggcggcccctgccctcatgtgacctcccttccctctctgtgcccagcgtggggtcgtgtgggaggaggtgcttatcatgctacctgaccacgtttctatcatccttctgagtgccaccgtccccaacgcccttgagtttgctgactggattgggtgagacgtgtgtcccgggttgcctgggtgaagggggctacagtactccttgattcgggtgggggactaagtctaccacagcaaggagagcggtcaggccttaggggtgatgctggggaacatgtcccacctggtggctgtgggatcccctttgggtccagattactttgcatgttgaaatgggatgagatgttgggggatagccttccattctgggtctcagaaaagactgggtaaagttggaggggtagggaagggggtggggatgygggttccttcccacgttcccacccctgacctgcttccctctcctttcttcaggcggctgaagcgtcgtcagatctatgtgattagcactgtaacccgccccgtgcccctggagcactatcttttcacagggaacagctccaagacccagggggagctctttttgttgctggactcccgaggagccttccatacaaaagggtaagcctcgagatgggggaaagagttagggctgggcccccagctggacattgtggctacccctccctgtgccccaggtactatgcagctgtggaggccaagaaggagagaatgagcaaacacgcccagacctttggggccaagcagcccacacatcaggggggccctgcacaggtgagaactgggagggttttgtacctgccagcacctgtttttcctcctatcttttttttccccttgtcccccaggggttttgacttgagctttgagcaytgccccagttaacactagctcacctctcattggttcaggaactcaacctctgctccttcccctyccccttccttctccaggaccgcggagtgtacctgtccctcctggcctccctccgcacacgtgcccagttgcccgtggtggtgttcaccttctcccggggccgctgtgatgagcaggcctcaggcctcacctcccttgacctcaccaccagttcggagaagagcgagatccacctcttcctgcagcgctgccttgctcgcctccgtggctctgaccgccagctgccccaggtgcgtctgtgtgcgtctgtgtgcgtgcatgcacacatttggcagactggtggggatagggtgttccgagactccatccctgaccatgggcctcctcccaccaaaggtcctgcacatgtcagagctcctgaatcgcggcctgggtgtgcaccatagcggcatcctgcccatcctcaaggagatcgtggagatgctcttcagccgtggcctggtcaaggtgcatgtggtggtggaaagggactcctcagggtgcttgttgcccacttaggggctgnccagagggcagaggggcagaggtttaggcaggccagtgctgtggttaagaatctgggctctggattcagactacctgggtttgaatcccaggtacaccatgtattcacagtatcatcctggaccaattatttaaccttcctgaactttaggtttcccatcttaaaatggggatgcataagatatgaatacgtaggtctcagaaaagaaacccaggaagctagcaagcattcgaaaagttattagtaatcagaaatatacaaattgaagtactcacaagatacgactttacagctattagactggtaaaatttaggaaactagttcatgccgagtgttgccagagatataggaggttgtagggttctgggaatcctttacgggatgcctagccagtttggaatgcacgctggcactatttagacaaaataactatattggccgggcatggtggctcacacctgtaatcccagcactttgggaggctgaggtgggtggatcacaaggtcaagagatcgagaccatcctggccaacatggtgaaaccctgtctctactaaaaatacaaaaattagctgggcatggtggcagrtgcctgtagtcccagctacttgggaggctgaggcaggagaattgcttgaacccaggaggcagagattgcagtgagccaagatagcaccgctgcactccagcctgggcaacagagggagactccatctcaaaacaaaaacaaacaaagaaacaaacaaaaactatatcatactctgagcttatatttcattcctgggtatatatcacaaagaaattctcaccctggtctgtgagagaacatgtacacccatcctttgtttgtggtggcatggtgttggtagtaccagggtgcccttcactgggagagagggaaggttagtgtgggggatgcacccatagagtgttctgcagcagttggaagcagtgggttagatgtggccacaggaacatggacaratgttgaaacactaggtggagaaaaagaagcaaaaaaaaatcagatatataaccactttttatatgaattataaactacaagctcacaaaagaagacatgttctataagatcatatttatataaaaagatatttgttggatacattggaatgattgcagtcagggatgggaatgggatatgaaggtaaaagttaagaaatagaaataagtagctacataagtaaaatgaggaaaacaataatacctgccctatagatttgcctggagagttcagtgagatcccataagtaacaactgggatggtgccttatgcctacaaagtaaggtgggcttggccagggctgggggtgtgtgtaygtagagcctttgctgatcctttctgttctcctctgtcccaggtcttgtttgccacagagacctttgccatgggagtaaacatgcctgctcgtacagtagtgtttgactccatgcgcaaacacgatggctccaccttccgggacctgctccctggggagtatgtgcagatggcaggccgggcagggcggaggggcctggaccccacaggcaccgttatcctgctctgcaagggccgagtgcccgagatggcagacctgcaccgcatgatgatggtgagcgggccagcatgctcggcagggccccagctccaggaccttgctggattctgtcttcgattctcctctcttctttttcttcttccttttttttttggagacagggtcttgctctgttacctaggctggagtgcagtggcacaatctcgggtcaccgcaacctctgccttccaggctcaagggatcctcccacctcagcctcccaagtaggtgggattccaggcacatgccacacaggcctggctaattttttttttttttttatgctttgtagagatgaggttttgctatgttgcacaggttggtcttgaacttctgggctcaagcagtctgtctgcctcagcttcccaaagtactgggattataggtgtgggccacagcgcccaacttcctccgacttttttgttttgcctgggagaagctgaggtaggagtgagtgaatccaaggatgagattggagcccatctcttccagttttctcccatgtgaatatggagctagatggggcctttgagtccatttatttcagtttgctcccttatgttacagaagaggtgagcaagtggtttgtccaaggcyccatggttgcagagctaggaccggatctgacgggagtaggcccagtccagaagactggctggggttcagtaggtcccaccctgatctcagtgacttctgtgrcctgactccaggggaagccrtcccagctgcagtcccagttccgcctcacgtacactatgatcctcaacttgctgcgagtggatgccctcagggtggaggacatgatgaagaggagcttctctgagtttccctcccgcaaagacagcaaggtaaggagcctggggtaaccagtgtgtggagcaggaggttggccaaagacaggctgggaataggtaggcatccagaggccagtgtgttgagggtggggagtgtgacagattgggcctggagactcccctttcacagcttcccctgctcccacccaaggcccatgaacaggccctggctgaactgaccaagaggctgggagctttggaggagcctgacatgactggccaactggtcgacctgcctgaatattacagctggggggaggaactgacagagacccagcacatgatccaggtgagcaagtgtgagwgctgaggaggtgataggagaagggaagagaagatcgtgttactctaggtgctactaaacttagtccaagtgtctgtccctgtgatgcctcctcccatctgtcctttgctcttcagcgacgcatcatggagtctgtgaacgggctgaagtctctctcagcaggaagggtggtggttgtgaagaatcaggagcatcacaacgcattgggagtgatcctacaggtgagggtgatgggaatttggactccagagggtgggagggagcaagccctctctccattttccccacttggccagggcaggttgcgtcatcatagggccctcattttcccctcttgccctccttttcaccctctcccttcccatcaccacatcatgytcactccttcctcccaccaccccaagaagtctgctctgatcgcttgacttggktgcccctctctactggtgagctctgcatggttgcttcctgattcctgcccaagggtgggtatctggtctctgcctttgatgtctactcatcacacccccstctcctggcctctctgaccacccccaggtctcctcgaactccaccagcagagtattcacaaccctggtcttgtgtgataagcccttgtcccaggacccacagracagggggccagccactgcagaggtgccctatccagatgacctcgtgggattcaagctgttcctgcctgaaggtgagagtgtggcagatgtctgttttctgccagcagtataagcaggatgcctgggtccatggcaatgtctgccctgctctccccttttcacagggccttgtgaccacaccrtggtcaagctccagccaggagatatggctgccatcaccaccaaggtgctccgggtgaatggggagaagatcttggaggacttcagcaagaggcagcagccaaaattcaagtcagagatgctagggaggcccttctcctccagaggggcacgtagaggcagggaggggcagtggtctgsgagtttcctccagcctgagggagaccatgaagtggtggggttgtagtgagggggctcccccagcctaagggagactgtgaagtggaggttgtagtaagagggcttccacagcctgagggaggcttctgkgggagagaagatcttaccccagatcttaagatctgctccctcttcaggaaggatcctccccttgcagccgtgaccactgctgtccaggaactgctgcgtctggctcaggcccacccagccggacctcccaccctcgaccctgtcaatgacctgcagctcaaagatatgtcagttgtagagggtgggctccgggcccggaagctggaggagctgatccagggggctcagtgtgtacacagcccccgttttcctgcccaggtaggaccctgggtggtaactcccaagctgggagtaggggcttttcctctgtggtcccctgtagactgaccgcccccatctcagcccttgtcctcagtgcacccctgctaaggggcaaggagaaggctgacgggtggctctctgcagtacctgaagctgcgggagcgaatgcagatacagaaggagatggagcggctgcgcttcctactgtcggatcagtcattgctgctgcttcctgagtaccatcagcgagtagaggtgggtggggcagtggttggggcaggggggctaggggacagcagtgtgtccaatgcycaccctttttcttgcaggtgctccgaaccctgggttaygtggaygaggygggcactgtgaagctggcagggcgggtggcttgtgccatgagcagccatgagttgctcctcactgagctcatgtttgacaatgcactgagcaccctgcggcctgaggagattgctgccttgctctctggcctggtctgccagagccctggggacgctggggatcagctcccaaacaccctcaagcaggtaggggacaccacccctttctccctgccagggctgtggcattcctgaccttcaccttcaggtagtcccccaggtgaccccctccagccctgtaagtgccccaaggatggaaaatggctgccttcttgatctggtccttccctgtcctggagcaggaaggcaggccttaayctctccttctttcctgcagggaatagaacgtgtccgggctgtggccaagcggattggtgaggtccaggtggcttgtsgsctgaaccagacggtggaggaatttgtgggggagctgaattttgggctggttgaggttgtatatgagtgggcccggggcatggtgagtacctgaggtttgggattttgcagacggctggctggggagaacctgcccaggctgagtgcatccagtcctcaccctactttccccacagcccttctccgagttggcagggctctcagggacccctgagggcctggtggtccgctgcattcagcgcctggctgagatgtgtcgctcactgcggggggcagcccgcctggtaggagagcctgtgctgggtgccaagatggagacagcggctaccttgctacggcgggacatcgkatttgcggccagcctctacacccagtgaatgccccatgtaaaaacaygatgataaaacagcaaagcactgttgtgtgcttgagttgctggacagggatgactcasctaagaagacagcgagagaacytyttagaaatatgcttttattatctgcacacagagatatgactgcctccctctaaagcattactatttgggagagggagtcttggggggtgatgggaggtcctgagtcatagcttccacataccatatgggcaggaaggcgtaaggtgcatcttggtgtacagacacggtgactgggccgccaggctcccaagagaagagatgaacgagcctggggggcagatggaggcatcagttgagggccagaggctggatcctgggatccagaggggagggacagagctgaatgcctcacctggggtcatcctggacaaccgtgctctgggcaaagctaaggaaggcggcacagaagttcatgcacacagagggattccagccgtcacggtcattctggagcaggcagaggaggaggcagaagatgggcagtgggggtggtgggaggagagaaggcaggctgttgccctggatgctagacctgtggtcttggtgtttggggatacgggtgggagctgcaacatcgttcccttaccctgacatattcaaacatcttcatggtaggaaaggtcttgagggaagagacaaaaccgtctgggttacggaagccagcaacaacattcgggacccctgggaggaatgactgagcccaccatttcaggagcttgtgtctgacaggaaaagcaagggatcagtgggacccctcgtgcaccctccattctgccttcaccctcctccccaagtccctttcccagccttcaagcctaagctctcgccctgcccaccccgatcctgaacctgtagaaactcctccattggccagggctgtgcatctccttggaggtcttgagctccacatagcaggttgggggctgtgtggatggggcttgggggtctgtgcagtctacctcccctgagaagagcagagggtggcttcccaggcggctgcgtagcacagagcagaaggccacgttggtgttaacctccccagaggggtctggggagcttccaggtttgtctgcacaaggagagaagcagcagcaggcgtggggggctctcaacctctgggaaggggaagggggctatgaagcaggggcaactcacctgcacacatgtactgctcaaatttgtatcccatgtacataagctcccggaggagcggtggccgagcaagcctctgggcccgagcgttcggtgtctccacttcactcaggtatagtgttccctggaaccgggaggctgccagctgccagccctcctgccgctcatacggtgtcgtcagcagttttgtcaggtgcccccgccacgtcactatggcctctgccagccagcctggacccctgagaggcaggagttacaggctgaaggtctgacacaagcattagtgagatgctcccctcgaagaatagtcttgtttcttctaaggactgattctcaccccggctttggctctcctaattttagagggtaggtacgggtctccagatatactgcctaccacgctttgctcacccctccaaccggcctcggtgttccaggagccagcacagcaggtggtccagcctttcctggacctcctcgtcccggggctggtatcgatccgggtatccgtctctgaggtcaaagttggggcctggaccgttagtggggggtgggctatagtagcgcagggctcgggcatctccatggtactggcgttgagcatccagggagaagcagcccagttccgaagggcgccggtagaaaggaaagggcccagagtagagggcagggtctgtgggcagagaaggtgctggacgaggtagtttgttccgaggctcagctacctctgtcttctcagctcctctcttggtccccctgggatccatgaggtcctaagacaagcaggggtacagagtttccattctacagaggaggcctggagaaggatgactggtttaggactaagcgagccacctgatcgccaggctctggccttgaaacattcaggcccctcagacgccaccgcggccaagctctcatcctgcctctttccttgcccttcacccaccctccctccaggtcctccaaatgcagtgaggttaggaaggacgtctgcgctcagatcaagaatccagttacctcaaagctccccaacttccacctccgcagagctatgacgtcatggcaggcacgccagaggccgaaggatgcaaaagtggttttctgctttcgatgatgcaatcattcagcgacagtggcgggcaaacccctcccggggcgggggaggtgtgagcttcacgaaggaggttgacaccaacgtggccaccggcgcccctccacgccgccaacgagtccccgggcgtgcgtgcccttggagggagccaatccgcggccggcgtggggcccggcctggcggaggtgatgctggtatgtgcgtcgccaccgcccctcccagcactgacgggcctgagggacgacaagttgacgctcctttcgtcatcacctggtctaggagggacgcccggggagaccgtacgtcactgctctgcgccggaagaccctattttcaggttctcttccctccattcctaccccttccccggtaccataaaatcccgggatatgagctggaagaggcatcacctgatcccggagacctttggagttaagaggcggcggaagcgagggcctgtggagtcggatcctcttcggggtgagccaggtaaccatggcaaccccgggggtggggcctcgcttccggtagccgagagttttgttagaaccgcgtccccgccccagttccctgtccgtgagccgatttatctgcccagggtcggcgcgcgcggctgtctcagaactcatgcagctgttcccgcgaggcctgtttgaggacgcgctgccgcccatcgtgctgaggagccaggtgtacagccttgtgcctgacaggaccgtggccgaccggcagctggtgaggggcgtcggtgcgaccgccggaagcccctttcctaactcctggaattccctgtcactcagtcactccgccagccgttcagcaagcattaggcctttcaggcgagggcactgtgccaggcactggggtgccacagagaccctgttaaaagtcccgcaggtagtacagggcatttcaaatcatggaggtagaagaacgaggcttttggggaaaccgagtcatggggcatggttcgaacatacagcgctgggagtgcagtcagacgtcagatcatgacaggccttgtacatcagtgttgtttccatcttacactgaggcgatgggctggtagagaatatcatagagagagggaatggtgtattggagatagtggatgaggcagggaggtcagctaagaagatactgcatctgagaagtggtgaaggcctaaattaggtcagtgcagtagggagggagaggagagtgaggaagagggaggagtccaggacaactcagactttccagatgactgcgtggctggtggtattaggagcacatttagttgttggactacagataatgtgtttaattttatacaagttgagttgatggtgcatgtggagcatccaaagacaaaggtattagacagttggatatgagagttggagagaattctgggccagtgataatagaattacaagtcatggaggtgtgaatagcaagtggttaattctgtgatgtggtgagatccagtaggaagagtgggtagaggagtgatttctaacctttttgtaatctttagaaggtgataaaagctatggctatctctctccagaaaaatgcacgtttgccacatatacatagggtgtatgtatagttaggggggaaatattttactaatcctgcgaggtccgtggttaaggactccaggtttagagtggaagttaatagggtcaaatccacaatgctgggaaacaccatcatttaaggcagtgttactgaatatatgagctgagttattatgcctgtgtcaaaattacgtgggctgcttgttaaaaaaaatacaggttcctgggactcatccaaggttaatgaattacgctctcttggggcgggatttgggactctacatttttgaactgcctcaagtgctttttaagtgtgccttaaaatttgagatccactgacataaagggaaagcagaagaagaggaatctgtgacagaggcagagagggacttgcctgagttaagaggaacccagaggccggcgcggtggctcacacctgtaatcccagcactttgggaggccgaggtgggtggatctcttgagctcatgagtttgataccagcatgggcaacatgacataaccccatctctacaaaaaatacaaaaattagccaggcgtggtggtacgcgcctatagagctactggggaggctgaggtgggaggattgcttgagctggggaggcggaggttgcagtgagctgagatagcaccgctgcaccccaccctgggtgatagagctagactttgtctcaaaaaaaaaaaaaaaaaaagtaacccaggaagaggcctactgtgaaagtaaagagatttttgagaaagtgaagtagttggcagtattagaacctgtgattcaagacagtggtctaagaagagggaagaggtaaagtaaaatataaactgaaatctaggctgagtgtggtggctcatgcctgtactcccaccactttgggagactgaggcaggagtatagcttgaaaccaaaagtttgagaccagcctgggcaacaaagtgagaccccatctttactaaataactgagatcccatctctactaaataaataaattaaaacacaaaaattcttagctgggcatggtggtgtgcacctattgttctagctgtttgggaagttgaggcagaaggagtgcttgagcccaggaatttgaggctgcagtgagctatgattgcacgactgcactccaggctgggtaacagagggagaccctgtctctaaaaaaatgaaaacaacaacaaaaaaacccagaactgaaatctgtccattggatttagcaggtagaaggttaatagtgatctttcaagaaaagaggaaagaaaaggaaggcagtctagcactcacttgaggtgagctagtctccctgactaggtctcccgtgaggaagcatgccagatggaaccactccttaaggagtatttgttgattttaatgtattggtgttagcttttgtttttaaaaacctttaaaagttgcagaatgaaaatataaacatatataatttaaatgatgtttataaagcagatacctatctagccactccctaggtcaaactatagaatatgaccagtatcccacatatatccctctctgatcaaaatgtctctgatcagaatgtccctgggaggtgactgctgtggtcattgttgccttagttttcccttttttttttttttttttgaggtggagtgtcgctctgttgcccaggctggagtgcagtggtgtgatctcaactcactgcaacctctgcctcctgggttcaagcaattctcctgcctcactgtcctgattagctgagactacaggcacgcgccaccatgcccagctaattttggtatttttagtagagatgggggtttcatcatgttggccataatggtcttgatctcctgacctcgtgatctgccctcctcggcctcccaaagtgctgggattacaggcatgatccaccgcacccggcctaattttgtatttttatagggatggggtttcaccctgttggccaggctggtctcaaactcctgactcagatgatctgcctgcctcggcctcccaaagtgctgttttttttttttttaattgtctttttgataattccactatttttttttttttttgaaaagtctcccatgtctacctctttccacacagacacggcaaccatccgatttctcaatcttttccccaccttttcccgctttctagtccacaaaaccaccattgtcatcgtggcccgttctcaatgagctgttgggcacacctcccagatggggtggtggccgggcagaggggctcctcacttcccagcaggggcggccgggcagaggcgcccctcacctcccggacagggcggctggccgggcggggggctgacccccccacctccctcccggacggggcggctggccgggcagaggggctcctcacttcccagtaggggcggccgggcagaggcgcccctcacctcccggacgaggcggctggccgggcggggggggctgaccccaccacct

SEQ ID NO: 96143 - DNA, 14682 bp, Homo sapiens
ctgttgaaaattaactaaaatcctggataaaaatgttattttaaaattgtttaagaccaggtacagtggctcatgcctgtaattcagcattttgggaggctgaggtagcaggatcaattgaggacaggagttcgagaccagtctgggcaacacagtgagacccccccacccgccacatctctacaaaaaatgtaaaaacagccaggcgtgggggcagacacctatggtcctagctacttgggagactaaggcaagaggatcacttgacccaggagtttgaggctgcagtaagatatgattgcaactgggcaacacagtgagaccccatctcttaaaaaaaattgtttagacactaaagagctcacaggataacaggaattaccactaatataacatctaagtaggccgggcgagatggctcaagcctgtaatcccggcactttgggaggctgacgtgggtggatcacctgaggtcaggagttcaatatcagcctgaccaatatggtaaaaccccgtctctactaaaactacaaaaattagccgggcgtggtgatgtgtgcctgtagtcccagctactcaggaggctgacacaggagaactgcttgaacccagaaagttgctgtgagccgagatcatgccactgcgctccagcctgggtgacagagtgagactctaactcaaaaaataaaaataaaaataactggggccgggcacggtggctcatgcctgtaatcccagcactttgggacgctaagggtggatcacttgaggtcagaagttcaagttcaagaccagcctggccaacatgatgaaacccggtctccattaaaaatacaaaaataggccagatgcggtggctcatgcctgtaatcccagcactttggcaggctgagacgggtggatcacgaggtccggagatcaagaccatcctggctaacacggtgaaaccccatctctactaaaaatacaaaaaaaaaaacaattagccaggcatagtggcgggcacctgtagtcccagctactcgggaggctgaggcgggagaatgggtgaacccaggaggcagagcttgcagtaagccaagatcatgccactgaactccagcctgggtgacagagcgagactccgtctcaaaaaaaaaaaaaaaaaaaaaattagctgggcgtggtgtcaggtgcctgtaatgccagctacttgggaggctgaggcaggagaatcacttgaactcaggaggcagaggttgcagtgagccaagatcataccactgcactccagcttggtgacagggtaagacactgtctcaaaaaaaaaaaagtaattggaacatggagggcatttattaatctaggcaaatctgcccagaacattttcaaaagtaactgggcgcataaggaaacaaaactcaaagagagaataaaaacaaaccccaaaagacaagtaatagtggaattatcctttccacggtctccctctgatgccgagccgaagctggactgtactgctgccatctcagctcactgcaacctccctgcctgactctcctgcctcagcctgccgagtgcctgcgattgcaggcgcgcgccgccacgcctgactggttttcgtattttgttagtggagacggggtttcgctgtgttggccgggctggtctccagctcctaaccgcgagtgatccgccagcctcggcctccggaggtgccgcgattgcagacggtgtctggttcactcagtgctcaatggtgcccaggctggagtgcagtggcgggatctcggcttgctacaacctccacctcccagccgcctgccttggcctcccaaagtgcccagagtgcagcctctgcccggccgccaccccgtctgggaagtgaggggcgtctctgcctggccgcccatcgtctgggatgtgaggagcccctctgcctggctgcccagtctggaaagtgaggagcgtctctgcccggccgccatcccatctaggaagtgaggagcgtctctgcccggccgctcatcgtctgagatgtggggagcgcctttgccccgccgccccgtctgggatgtgaggagcgcctctgcccggccgcgaccccgtctgggaggtgaggagggtctctgcccagcctccccgtctgagaagggaggagaccctccgcccggcagccgccccgtctgagaagtgaggagcatctccgcccggcagccgccccctccaggagggaggtgggggggtcagccccctgcccggccagccaccccgtccgggaggtgaggggcgcccctgcccagccacccctactgggaagtgaggagcccctctgcccggccagccgccctgtccgggagggaggtgggggggtcagccccccacgcagccagccgccccgtccgggagggaggtggggggtcagccccccacccggccagccgccccgtctgggagggaggtggtggggtcagccccccccgcccggccagccgcctcgtccgggaggtgaggggcgcctctgcccggccgcccctactgggaagtgaggagcccctctgcccggccagccgccccgtccgggagggaggtgggggggtcagccccccgcccggccagccgccctgtccgggaggtgaggggcgcctctgcccggccgcccctgctgggaagtgaggagcccctctgcccggccaccaccccatctgggaggtgtgcccaacagctcattgagaacgggccacgatgacaatggtggttttgtggactagaaagcgggaaaaggtggggaaaagattgagaaatcggatggttgccgtgtctgtgtggaaagaggtagacatgggagacttttcaaaaaaaaaaaaaaatagtggaattatcaaaaagacaattaaaaaaaaaaaaaacagcactttgggaggccgaggcaggcagatcatctgagtcaggagtttgagaccagcctggccaacagggtgaaaccccatccctataaaaatacaaaattaggccgggtgcggtggatcatgcctgtaatcccagcactttgggaggccgaggagggcagatcacgaggtcaggagatcaagaccattatggccaacatgatgaaacccccatctctactaaaaataccaaaattagctgggcatggtggcgcgtgcctgtagtctcagctaatcaggacagtgaggcaggagaattgcttgaacccaggaggcagaggttgcagtgagttgagatcacaccactgcactccagcctgggcaacagagcgacactccacctcaaaaaaaaaaaaaaaaaagggaaaactaaggcaacaatgaccacagcagtcacctcccagggacattctgatcagagacattttgatcagagagggatatatgtgggatactggtcatattctatagtttgacctagggagtggctagataggtatctgctttataaacatcatttaaattatatatgtttatattttcattctgcaacttttaaaggtttttaaaaacaaaagctaacaccaatacattaaaatcaacaaatactccttaaggagtggttccatctggcatgcttcctcacgggagacctagtcagggagactagctcacctcaagtgagtgctagactgccttccttttctttcctcttttcttgaaagatcactattaaccttctacctgctaaatccaatggacagatttcagttctgggtttttttgttgttgttttcatttttttagagacagggtctccctctgtyacccagcctggagtgcagtcgtgcaatcatagctcactgcagcctcaaattcctgggctcaagcactccttctgcctcaacttcccaaacagctagaacaataggtgcacaccaccatgcccagctaagaatttttgtgttttaatttatttatttagtagagatgggatctcagttatttagtaaagatggggtctcactttgttgcccaggctggtctcaaacttttggtttcaagctatactcctgcctcagtctcccaaagtggtgggagtacaggcatgagccaccacactcagcctagatttcagtttatattttactttacctcttccctcttcttagaccactgtcttgaatcacaggttctaatactgccaactacttcactttctcaaaaatctctttactttcacagtaggcctcttcctgggttactttttttttttttttttttgagacaaagtctagctctatcacccagggtggggtgcagcggtgctatctcagctcactgcaacctccgcctccccagctcaagcaatcctcccacctcagcctccccagtagctctataggcgcgtaccaccacgcctggctaatttttgtattttttgtagagatggggttatgtcatgttgcccatgctggtatcaaactcatgagctcaagagatccacccacctcggcctcccaaagtgctgggattacaggtgtgagccaccgcgccggcctctgggttcctcttaactcaggcaagtccctctctgcctctgtcacagattcctcttcttctgctttccctttatgtcagtggatctcaaattttaaggcacacttaaaaagcacttgaggcagttcaaaaatgtagagtcccaaatcccgccccaagagagcgtaattcattaaccttggatgagtcccaggaacctgtattttttttaacaagcagcccacgtaattttgacacaggcataataactcagctcatatattcagtaacactgccttaaatgatggtgtttcccagcattgtggatttgaccctattaacttccactctaaacctggagtccttaaccacggacctcgcaggattagtaaaatatttcccccctaactatacatacaccctatgtatatgtggcaaacgtgcatttttctggagagagatagccatagcttttatcaccttctaaagattacaaaaaggttagaaatcactcctctacccactcttcctactggatctcaccacatcacagaattaaccacttgctattcacacctccatgacttgtaattctattatcactggcccagaattctctccaactctcatatccaactgtctaatacctttgtctttggatgctccacatgcaccatcaactcaacttgtataaaattaaacacattatctgtagtccaacaactaaatgtgctcctaataccaccagccacgcagtcatctggaaagtctgagttgtcctggactcctccctcttcctcactctcctctccctccctactgcactgacctaatttaggccttcaccacttctcagatgcagtatcttcttagctgacctccctgcctcatccactatctccaayacaccattccctctctctatgatattctctaccagcccatcgcctcagtgtaagatggaaacaacactgatgtacaaggcctgtcatgatctgacgtctgactgcactcccagcgctgtatgttcgaaccatgccccatgactcggtttccccaaaagcctcgttcttctacctccatgatttgaaatgccctgtactacctgcgggacttttaacagggtctctgtggcaccccagtgcctggcacagtgccctcgcctgaaaggcctaatgcttgctgaacggctggcggagtgactgagtgacagggaattccaggagttaggaaaggggcttccggcggtcgcaccgacgcccctcaccagctgccggtcggccacggtcctgtcaggcacaaggctgtacacctggctcctcagcacgatgggcggcagcgcgtcctcaaacaggcctcgcgggaacagctgcatgagttctgagacagccgcgcgcgccgaccctgggcagataaatcggctcacggacagggaactggggcggggacgcggttctaacaaaactctcggctaccggaagcgaggmcccacccccggggttgccatggttacctggctcaccccgaagaggatccgactccacaggccctcgcttccgccgcctcttaactccaaaggtctccgggatcaggtgatgcctcttccagctcatatcccgggattttatggtaccggggaaggggtaggaatggagggaagagaacctgaaaatagggtcttccggcgcagagcagtgacgtacggtctccccgggcgtccctcctagaccaggtgatgacgaaaggagcgtcaacttgtcgtccctcaggcccgtcagtgctgggaggggcggtggcgacgcacataccagcatcacctccgccaggccgggccccacgccggccgcggattggctccctccaagggcacgcacgcccggggactcgttggcggcgtggaggggcgccggtgkccacgttggtgtcaacctccttcgtgaagctcacacctcccccgccccgggaggggtttgcccgccactgtcgctgaatgattgcatcatcgaaagcagaaaaccacttttgcatccttcggcctctggcgtgcctgccatgacgtcatagctctgcggaggtggaagttggggagctttgaggtaactggattcttgatctgagcgcagacgtccttcctaacctcactgcatttggaggacctggagggagggtgggtgaagggcaaggaaagaggcaggatgagagcttggccgcggtggcgtctgaggggcctgaatgtttcaaggccagagcctggcgatcaggtggctcgcttagtcckaaaccagtcatccttctccaggcctcctctgtagaatggaaactctgtacccctgcttgtcttaggacctcatggatcccagggggaccaagagaggagctgagaagacagaggtagctgagcctcggaacaaactacctcgtccagcacctwctctgcccacagaccctgccctctaytctgggccctttcctttctaccggcgcccttcggaactgggctgcttctccctggatgctcaacgccagtaccatggagwwgcccgagccctgcgctactatagcccaccccccactaacggtccaggccccaactttgacctcagagacggatacccggatcgataccagccccgggacgaggaggtccaggaaaggctggaccacctgctgtgctggctcctggaacaccgaggccggttggaggggtgagcaaagcgtggtaggcagtatatctggagacccgtacctaccctctaaaattaggagagccaaagccggggtgagaatcagtccttagaagaaacaagactattcttcgaggggagcatctcactaatgcttgtgtcagaccttcagcctgtaactcctgcctctcaggggtccaggctggctggcagaggccatagtgacgtggcgggggcacctgacaaaactgctgacgacaycgtatgagcggcaggagggctggcagctggcagcctcccggttccagggaacactatacctgagtgaagtggagacaccgaacgctcgggcccagaggcttgctcggccaccgctcctccgggagcttatgtacatgggatacaaatttgagcagtacatgtgtgcaggtgagttgcccctgcttcatagcccccttccccttcccagaggttgagagcccsccamkcctgctgctgcttctctccttgtgcagacaaacctggaagctccccagacccctctggggaggttaacaccaacgtggccttctgctctgtgctacgcagccgcctgggaagccaccctctgctcttctcaggggaggtagactgcacagacccccaagccccatccacacagcccccracctgctatgtggagctcaagacctccaaggagatgcahagccctggccaatggaggagtttctacaggttcaggatcggggtgggcagggcgagassttaggcttgaaggctgggaaagggacttggggaggagggtgaaggcagaatggagggtgcacgaggggtcccactgatcccttgcttttcctgtcagacacaagctcctgaaatggtgggctcagtcattcctcccaggggtcccgaatgttgttgctggcttccgtaacccagacggttttgtctcttccctcaagacctttcctaccatgaagatgtttgaatatgtcagggtaagggaacgaygttgcagctcccacccgtatccccaaacaccaasrccacaggtctagcatccagggcaacagcctgccttctctcctcccaccacccccactgcccatcttctgcctcctcctctgcctgctccagaatgaccgtgacggctggaatccctctgtgtgcatgaacttctgtgccgccttccttagctttgcccagagcacggttgtccaggatgaccccaggtgaggcattcagctctgtmcctcccctctggatcccaggatccagcctctggccctcaactgatgcctccatctgccccccaggctcgttcatctcttctcttgggagcctggcggcccagtcaccgtgtctgtacaccaagatgcaccttacgccttcctgcccatatggtatgtggaagctatgactcaggacctcccatcaccccccaagactccctctcccaaatagtaatgctttagagggaggcagtcatatctctgtgtgcagataataaaagcatatttctaarargttctctcgctgtcttcttagstgagtcatccctgtccagcaactcaagcacacaacagtgctttgctgttttatcatcatgtttttacatggggcattcactgggtgtagaggctggccgcaaatmcgatgtcccgccgtagcaaggtagccgctgtctccatcttggcacccagcacaggctctcctaccaggcgggctgccccccgcagtgagcgacacatctcagccaggcgctgaatgcagcggaccaccaggccctcaggggtccctgagagccctgccaactcggagaagggctgtggggaaagtagggtgaggactggatgcactcagcctgggcaggttctccccagccagccgtctgcaaaatcccaaacctcaggtactcaccatgccccgggcccactcatatacaacctcaaccagcccaaaattcagctcccccacaaattcctccaccgtctggttcagscsacaagccacctggacctcaccaatccgcttggccacagcccggacacgttctattccctgcaggaaagaaggagagrttaaggcctgccttcctgctccaggacagggaaggaccagatcaagaaggcagccattttccatccttggggcacttacagggctggagggggtcacctgggggactacctgaaggtgaaggtcaggaatgccacagccctggcagggagaaaggggtggtgtcccctacctgcttgagggtgtttgggagctgatccccagcgtccccagggctctggcagaccaggccagagagcaaggcagcaatctcctcaggccgcagggtgctcagtgcattgtcaaacatgagctcagtgaggagcaactcatggctgctcatggcacaagccacccgccctgccagcttcacagtgcccrcctcrtccacrtaacccagggttcggagcacctgcaagaaaaagggtgggcattggacacactgctgtcccctagcccccctgccccaaccactgccccacccacctctactcgctgatggtactcaggaagcagcagcaatgactgatccgacagtaggaagcgcagccgctccatctccttctgtatctgcattcgctcccgcagcttcaggtactgcagagagccacccgtcagccttctccttgccccttagcaggggtgcactgaggacaagggctgagatgggggcggtcagtctacaggggaccacagaggaaaagcccctactcccagcttgggagttaccacccagggtcctacctgggcaggaaaacgggggctgtgtacacactgagccccctggatcagctcctccagcttccgggcccggagcccaccctctacaactgacatatctttgagctgcaggtcattgacagggtcgagggtgggaggtccggctgggtgggcctgagccagacgcagcagttcctggacagcagtggtcacggctgcaaggggaggatccttcctgaagagggagcagatcttaagatctggggtaagatcttctctcccccagaagcctccctcaggctgtggaagccctcttactacaacctccacttcacagtctcccttaggctgggggagccccctcactacaaccccaccacttcatggtctccctcaggctggaggaaactcscagaccactgcccctccctgcctctacgtgcccctctggaggagaagggcctccctagcatctctgacttgaattttggctgctgcctcttgctgaagtcctccaagatcttctccccattcacccggagcaccttggtggtgatggcagccatatctcctggctggagcttgaccayggtgtggtcacaaggccctgtgaaaaggggagagcagggcagacattgccatggacccaggcatcctgcttatactgctggcagaaaacagacatctgccacactctcaccttcaggcaggaacagcttgaatcccacgaggtcatctggatagggcacctctgcagtggctggccccctgtyctgtgggtcctgggacaagggcttatcacacaagaccagggttgtgaatactctgctggtggagttcgaggagacctgggggtggtcagagaggccaggagaggggggtgtgatgagtagacatcaaaggcagagaccagatacccacccttgggcaggaatcaggaagcaaccatgcagagctcaccagtagagaggggcaaccaagtcaagcgatcagagcagacttcttggggtggtgggaggaaggagtgagcatgatgtggtgatgggaagggagagggtgaaaaggagggcaagaggggaaaatgagggccctatgatgacgcaacctgccctggccaagtggggaaaatggagagagggcttgctccctcccaccctctggagtccaaattcccatcaccctcacctgtaggatcactcccaatgcgttgtgatgctcctgattcttcacaaccaccacccttcctgctgagagagacttcagcccgttcacagactccatgatgcgtcgctgaagagcaaaggacagatgggaggaggcatcacagggacagacacttggactaagtttagtagcacctagagtaacacgatcttctcttcccttctcctatcacctcctcagcactcacacttgctcacctggatcatgtgctgggtctctgtcagttcctccccccagctgtaatattcaggcaggtcgaccagttggccagtcatgtcaggctcctccaaagctcccagcctcttggtcagttcagccagggcctgttcatgggccttgggtgggagcaggggaagctgtgaaaggggagtctccaggcccaatctgtcacactccccaccctcaacacactggcctctggatgcctacctattcccagcctgtctttggccaacctcctgctccacacactggttaccccaggctccttaccttgctgtctttgcgggagggaaactcagagaagctcctcttcatcatgtcctccaccctgagggcatccactcgcagcaagttgaggatcatagtgtacgtgaggcggaactgggactgcagctgggayggcttcccctggagtcaggycacagaagtcactgagatcagggtgggacctactgaaccccagccagtcttctggactgggcctactcccgtcagatccggtcctagctctgcaaccatggggccttggacaaaccacttgctcacctcttctgtaacataagggagcaaactgaaataaatggactcaaaggccccatctagctccatattcacatgggagaaaactggaagagatgggctccaatctcatccttggattcactcactcctacctcagcttctcccaggcaaaacaaaaaagtcggaggaagttgggcgctgtggcccacacctataatcccagtactttgggaagctgaggcagacagactgcttgagcccagaagttcaagaccaacctgtgcaacatagcaaaacctcatctctacaaagcataaaaaaaaaaaaaaaattagccaggcctgtgtggcatgtgcctggaatcccacctacttgggaggctgaggtgggaggatcccttgagcctggaaggcagaggttgcggtgacccgagattgtgccactgcactccagcctaggtaacagagcaagaccctgtctccaaaaaaaaaaggaagaagaaaaagaagagaggagaatcgaagacagaatccagcaaggtcctggagctggggccctgccgagcatgctggcccgctcaccatcatcatgcggtgcaggtctgccatctcgggcactcggcccttgcagagcaggataacggtgcctgtggggtccaggcccctccgccctgcccggcctgccatctgcacatactccccagggagcaggtcccggaaggtggagccatcgtgtttgcgcatggagtcaaacactactgtacgagcaggcatgtttactcccatggcaaaggtctctgtggcaaacaagacctgggacagaggagaacagaaaggatcagcaaaggctctacatacacacacccccagccctggccaagcccaccttactttgtaggcataaggcaccatcccagttgttacttatgggatctcactgaactctccaggcaaatctatagggcaggtattattgttttcctcattttacttatgtagctacttatttctatttcttaacttttaccttcatatcccattcccatccctgactgcaatcattccaatgtatccaacaaatatctttttatataaatatgatcttatagaacatgtcttcttttgtgagcttgtagtttataattcatataaaaagtggttatatatctgatttttttttgcttctttttctccacctagtgtttcaacatytgtccatgttcctgtggccacatctaacccactgcttccaactgctgcagaacactctatgggtgcatcccccacactaaccttccctctctcccagtgaagggcaccctggtactaccaacaccatgccaccacaaacaaaggatgggtgtacatgttctctcacagaccagggtgagaatttctttgtgatatatacccaggaatgaaatataagctcagagtatgatatagtttttgtttgtttctttgtttgtttttgttttgagatggagtctccctctgttgcccaggctggagtgcagcggtgctatcttggctcactgcaatctctgcctcctgggttcaagcaattctcctgcctcagcctcccaagtagctgggactacaggcacctgccaccatgcccagctaatttttgtatttttagtagagacagggtttcaccatgttggccaggatggtctcgatctcttgaccttgtgatccacccacctcagcctcccaaagtgctgggattacaggtgtgagccaccatgcccggccaatatagttattttgtctaaatagtgccagcgtgcattccaaactggctaggcatcccgtaaaggattcccagaaccctacaacctcctatatctctggcaacactcggcatgaactagtttcctaaattttaccagtctaatagctgtaaagtcgtatcttgtgagtacttcaatttgtatatttctgattactaataacttttcgaatgcttgctagcttcctgggtttcttttctgagacctacgtattcatatcttatgcatccccattttaagatgggaaacctaaagttcaggaaggttaaataattggtccaggatgatactgtgaatacatggtgtacctgggattcaaacccaggtagtctgaatccagagcccagattcttaaccacagcactggcctgcctaaacctctgcccctctgccctctgggcagcccctaagtgggcaacaagcaccctgaggagtccctttccaccaccacatgcaccttgaccaggccacggctgaagagcatctccacgatctccttgaggatgggcaggatgccgctatggtgcacacccaggccgcgattcaggagctctgacatgtgcaggacctttggtgggaggaggcccatggtcagggatggagtctcggaacaccctatccccaccagtctgccaaatgtgtgcatgcacgcacacagacgcacacagacgcacctggggcagctggcggtcagagccacggaggcgagcaaggcagcgctgcaggaagaggtggatctcgctcttctccgaactggtggtgaggtcaagggaggtgaggcctgaggcctgctcatcacagcggccccgggagaaggtgaacaccaccacgggcaactgggcacgtgtgcggagggaggccaggagggacaggtacactccgcggtcctggagaaggaaggggaaggggaaggagcagaggttgagttcctgaaccaatgagaggtgagctagtgttaactggggcagtgctcaaagctcaagtcaaaacc

SEQ ID NO: 96144 - DNA, 18303 bp, Homo sapiens
acctataatctcaatgctctggaaggccgaggcaggcagacagacagattgaggccaggagtttgagaccaacctgggcaacatagtgagaccctgtctctaccaaaaaaaaaagaaaaaacccagaatttgtttttactgtcagtggactgaggaggggagacttagtgggagagtctgaggtcttttaattccattgagcttttttgtgtcattggcacaggtgcatttcttcaatagtttcttctatgataaactccgtaccaagggttatgatggggtgaaaaggtggaccaaaaacgtgagttttgaattcacatccacttgtgtaatgccttgcctctaaagaatgagagtcttgttttctctgagccctttccctgaccgtgttcattcagtctttcaaagattaaacgtctcttgtgtgtgtaggcactaaggatacagtgttaaataaggaaaacttgcccttaaagttaaattgcagctagtgataagtgctgtgggcagatcaacacagagtaacgtgaggctgggcgcagtggctcacgcctgtaatccccagcactttgggaggccaacacgggcggatcacctgaggtcaggagttcgagactagcctggccaacattgagaaaccccatctctattaaaaatacaaaaattagccctgtgtgatggcaggtggcctgtaagcccagctattcctggaggcggaggcaggagaatcccatgaacctgggaggcagaggttgcagtgagccgagaccccgccattgcactccagcctgggcaacaagagcaaaactccgtctcaaaaaaaaaaaaaaatcacagtaatgtcatagcgtgggaagtgggtactttagattgggtgatctaggaaggcctctcatagctgagacgtgaatgatgagcagccagccatgcgcagacctgggaatagcaagtacacaagacccatagtgaaaaaccatggctgaggaacagagggcttgtgggggtgacctgtgtagttggcgcagagtgagcaaagggagatggatacaaaattcggtcagagagtagatcatgtaagacatgtacggtaggctgaggaggggggattttattgcgtgtatactgagaagccattgagttttaagcaggctgagaagtgccttctgttttaaactcctgtttcaatgacagattgaaaggggggcaagaatggaagcaggaacagagcacagtagtccaggtgagaaacttgaactggagtgctaaaggaagagagagagagtagttttatgtaggataaattttacgagtaaaaccagtaggactgacaggctctgtgatactgagagatacatatttggtctcctgaccaggctcctggcattcaacttctaaaatccttggaatctccagtgatgtgtgtttttgtgtgctgatgagttgattcatggctagcccctctaggtggcttcatgattagagggttggaactttcagcctcacccccaccaacttcctgggaggggaatggggccaaaggttaaggcaatcactgaggatcagtgatttaatcagtcatgcctagtagtgaagcctctaaaaaccggaaaggggccgggtgcggcggctcacgcctgtactcccggcactttgggaggctgaggcagatggatcgcaaggtcaagagattgagaccagcctggccgacctggcgaaaccctgtctctactaaaaatatgaaaattagctgggcgtggtggcgtgcgcctgtagtccccgggaggctgaggcaggagaatcgcttgaacccgggaggcagaggttgcagtgagccgagattgtgccactgcactccaccctgggtgacagagtgaaactctgtctcaaaaaagaaaaaaaaacccgagaggaggagtttggagacattctagatagctgaaggcatggaggctcccacaggatggtctccaggcctcttcccggtacctttccctgtgcatcttttcatctgtactctttgtactaccctttgttaataaactggtaaatgtgtttccatgagttctgtgagctgctctagcaaattaatcaaattcaaggagggggtcatgggaacgctgatctaaccagttggtgagaaacacagataaaacaacctggggcttaggactggcatcagaattgggggcagccttgtgagactgagccctaaacctgtgacacattatctccaggtagatagtgttggaattgaattgggggatacccagctgtgtccaccgcaaaattgcttgcttggttgttggtggagagaaagccccacaaacacttcttggtgaccacaggttacagaagtattttgtgttgtgagagtatagtaggaaagaagatttgtttttttgccgggcgcggtggctcacgcctgtaatcccagccctttgggaggctgaggcgggcggatcaccaggtcaggagatcaagaccatcctggctaacacagtgaaaccctgtctctactaaaaatacaaaaaattagccgggcgaggtggcacgtgtctgtagtccaagctacttgggaggctgaggcaggagaatggcatgaacccaggaggtggagcttgcagtgaggcaagatcacgccactgcactccagtctgggcaacagagcaagactccgtctcaaaaaaaaaaaaaaaaaaaaagatttgttttttcctctgcaggttggatgtgggaaatgaagaaaaagaaatggaggatgatgcctaggtttttggcctatgtaacgggaaaagtgggagaggaacaggttgggggaggaaaatgaagagttcttttctcttctggtttccctgccctcccattcaaaagccaggaaatttctacagctaggcaggatgattggctccggcattccttaatttcagtcctcaaaatcaagagcttacaccctcagggatcttcttgcagtagagggaagggtggtgacgtacagtgaaaaacatgttggccttcttcatactgagtttgagtcccacttctgccatttctttctttcatgaccttgtgcaagtcacgactttccaagctgcaatttcctcatctgttaggttgaatgttgagaacttcccggtaggattgttatgagcattaactgcgtgtttactttgtgctgtgtcttgttctaagtgtattatggatagtcactagtttaatcctcatatcaaatggatgaggtgtaggtactactatttacactctctgacagataaggaaactgaggtatagaaggttattaagtaggttgcccactgtcataagccagtaaatggaggagctgtatttgaattctggcaggctccagaatcctgggcctgggttcttagctgctaagtgcttctccctttaaagtgtgaaaagcgcctgcccatcatgggttctcmagtgttcgttctgatgtctcctccattgtctgaccttcctcccttaccccgaagaaccgaaacatgcagatcctgagcttgcccacaatctaggccttgggtcttctgttctttcacttggttcccttacctgtgtctctgttcctctctagaaccttcatggcaaaaggcaagacttctgtttgttgtacctgacctgtggcactatctctttaggtggacatcttcaataaggagctactgctaatccccatccacctggaggtgcattggtccctcatctctgttgatgtgaggcgacgcaccatcacctattttgactcgcagcgtaccctaaaccgccgctgccctaaggtttgagggggtaggagagagatgggcaaaatgtggggcggtgcagtggcaaggcattgcaggaagaagggtgggctttgggtctttgaggggcgacctgggcatggtgtctgccagcactgtacccaccatactgtgttcaattgagaaacttagggcatcactttcttttcccccatccacatagcatattgccaagtatctacaggcagaggcggtaaagaaagaccgactggatttccaccagggctggaaaggttacttcaaaatggtgagtttcctgagggaggggtatagggtgttggtggggacagtggtagaaggcagaaattgaagtcctacccctgggagtctccatgtgaagggcctgctttctttctcttctctagaatgtggccaggcagaataatgacagtgactgtggtgcttttgtgttgcaggtaagcagatgatggggccacctcctctagctctgaagtcagttgggttaaagggtcgggaggctgttatgcatcccctcatttggctcatagtcagttgtggagcaggaagtaatctgttttagaacaccaaaacactggcttcactggttctcttctggacttctccatcccacattgggactgggtctctagtcttgggcctctggccttcatagagctccctgctaacctccaactcagtgtattttctccatctaaaacattctatcaagtaagaacactagctttagagtcaggctgtttttgaaccccaggctgtgggaccctggctccctttggggatgttctctgaaggatggagacacatctcatatgaaatgtgtagcacaggtcctgacacggggggtttctcatggcttgctttgttaacacccagtactgcaagcatctggccctgtctcagccattcagcttcacccagcaggacatgcccaaacttcgtcggcagatctacaaggagctgtgtcactgcaaactcactgtgtgagcctcgtacccsagaccccaagcccataaatgggaagggagacatgggagtcccttcccaagaaactccagttcctttcctctcttgcctcttcccactcacttccctttggtttttcatatttaaatgtttcaatttcgtgtatttttttttctttgagagaatacttgttgatttctgatgtgcaggggrtggctacagaaaagcccctttcttcctctgtttgcaggggagtgtggccctgtggccctgggtggagcagtcatcctcccccttccccgtgcagggagcaggaaatcaggatggggggaggggggcggacaataggatcacagcccgccagatatcatatatatatatatatatatatatatatatatatatatatatatatatatatatatatatatatatatatatatataaaaatgccacggtcctgctctggtcaataaaggatcctttgttgatacgtaagtggtggtcttccttaaggggcttcaaattagtggatatgcttagctcagaccttccagccagtctcttgagactaaagggttcagctttccatccctggctcaggcactgccaacaccttgtcttcacccaaacaaatcccccagatgggagcagagagcaggaaggagggaaagtagataagcctcaagaataagggcatccgagagggaagcgtggggaactggacacaagggactggggaggggaccaaccaggattcatgatagtaccccaaagccctttacagttttcttccatccctccaccatccagccaggggaatcctcccatccctacgatatcgctgttgattccttcatccctggcacacgtccaggcagtgtcgaatccatctctgctacaggggaaaacaaataacatttgagtccagtggagaccgggagcagaagtaaagggaagtgataacccccagagcccggaagcctctggaggctgagacctcgccccccttgcgtgatagggcctacggagccacatgaccaaggcactgtcgcctccgcacgtgtgagagtgcagggccccaagatggctgccaggcctcgaggcctgactcttctatgtcacttccgtaccggcgagaaaggcgggccctccagccaatgaggctgcggggcgggccttcaccttgataggcactcgagttatccaatggtgcctgcgggccggagcgactaggaactaacgtcatgccgagttgctgagcgccggcaggcggggccggggcggccaaaccaatgcgatggccggggcggagtcgggcgctctataagttgtcgataggcgggcactccgccctagtttctaaggatcatgtctgcgagccaggattcccggtaagaaaggcatttgcaagagattgtggctgcttattttgccgcccccttccgacgggcccgccgggggtagctgagaggcccaccagggttgcgggagaaaccgaaccgggtggggggagggtccgacttggaggggcgagggggaagacccacggccgacgcggccaccaggtcgaggcggagggtagggacagcccggctagggtcaggcgtgcgaggtctgttacgaggcctcgacccgaggcggtgccatgcgcgaagccccggcgctgagtggcgagacggggtcgcgacctggcgtgggaaagaaaggtggaggcggccgccactatgtgtggcccagagccggcaggtccggttgcctccctgtgccgggggagggacggcgcgcggggttccggagcattctgacggtaccactcgcgagaggcgggggtgcctggtccttagatccagtcacttcgtcgcggctaaaacacgggtcggggagaagaaaccggccgttcagtgtgctggttttcttgacggccaggactgagcctaaccccgaggagcggccgcgtgaggcaccaggagcccacccggcgccgggcgggcgggtccattttgccgcacaagccgggctattggcaaactgcggatgggcaggtccaccttccttcgggggtgagcggcctgaggtatgggagggcgacgctacttcgcgacgggggcgggcgggatgtggattgttccatggaggggtgggagacgccgccgggtggtcgagggagcgagcacatggtggcctgaggcgttcccctcccccagtctgcttcgcttctaagtgttgtgcaatctccccctttgctagctcggcttgggctcattgtgcgcgaggccgccaccgcccgcggcctcccacatccgggcaacgcgaggggggggcttcggctggagggagtgggggagggcgcgggcgggatgacgtggggggaaggggatgtcctaccctccgatctgggaggtgaagggcgggacttccagcgcgctggtgctgcggtgggaggtgcacgcgcttgggctttaagcggctgggtcgggcccacgtggacccggcggcaagcaccacctctgggcaccgtgagcgcggcggcacgcctgccggcctgtcttcagaaagggtcacccccttatgtcgggggtggcctggcytgagccgctgcctgcatggggcaaatgcctcagttttatagaaactcctcctttgggtattttttgggagctggtgggagttggatctgggacagcagrttgatggcatcatgcaggccactcctgacagagcccggctgtcaggatttctgagtrcttcggtcgggcaggggacaaaacttatgctttaaaccaacagatccagagacaatggccccgatgggatggagcccgaaggcgtcatcgaggtgagactggagaaatggaattctgtcctcccccattacaactttcagccgtatagagttagagtggcctcttgattgatttcccagatcatctagaagcagctggtttccctaaagggaggagggttgtaagctctgaggcttttgttagtaggcaccagattctgtttgctcggagactacagctcagctccmccttttccatgactcaagctttaatttctttgcatcccctagagtaactggaatgagattgttgacagctttgatgacatgaacctctcggagtcccttctccgtggcatctacgcstatggttttgagaagcccyctgccatccagcagcgagccattctaccttgtatcaagggtgagacctctcagtcccagaagacattgtggactgtccctgacctgggtagagtggcatctggttggtgatgcccatctcatatcagccagggacaaagcaactccttgttcatcccagcttggcttttgatccgtgcccatgcctggttcatgccttggacacataggtttcctttaaagaggtggtattgtagccagcttatatttgcatctacagccatgtttctagtccagcttggtgtgcaatactagatgagttaataactggtccttgtttctgayctggttcccattgtgtaactgtgttgattgggaaggtagtttgtgagccatgaaatgcttggttcattggttgcttattgacctcattaacctaggacttgaatatcccaaagggtatgctctttaccacattcaactcctaatttatttgtttaggttatgatgtgattgctcaagcccaatctgggactgggaaaacggccacatttgccatatcrattctgcagcagattgaattagatctaaaagccacccaggccttggtcctagcacccactcgagaattggctcagcaggtaagagtggcttctattccctccttcagggctgatttagggatgatgagtataatccaaggaccagagaagtcttctctgatcaccaccttgggaggaagacatgggtgccctaacactctcgagacctgctgggttaattaaaagctatttcttacccaaacgtaaccattgcttcctccacccatttcctgagtcaaatgggaaagctgttgggtgaagcctggctggctgggcaagtttgactgtgttctgaataagcaccttcactatgggctaagagatcccttggtgtgggggtgatcttacagtagtcagagcagatggacagtccttttcacccttgcttaatagccagagctgtttcatgcctggggcacacacaattctaatgctggactttttcctgggtcatgctgcaacactgatgtcagagcatgtttttaaatgttctgtggcaggggcagtgattattctgggtgtggataatgtaagaagttacagcagagctccattctaaggcacttggctctcagttttctcagagtgaacatgcctcgtagcttgggtcctatggcaggagtgcaataggacatggatatgcatcacctgttctataaaactggttgctggctgggygcggtggctcaactcgtataatcccaacactttgggaggccaaggcaggcagatctcttgagatcaggagttggagaccagcctggccaacatagtgaaaccccgcttctactaaaaatacaaaaattagccaggcatggtggcgtgtgccttttatcccagctactcgggaagctcaggcaggagaatttaacccaggaggtggaggttgcagtgagctgagattgtgccattgcactccagcctgggcaacgagcaaagctctgtctcaaaaaaagaaaaaaaaaatggttgctgcgtgatgaggcagttggtcaaattagttttcagaaggttaagggttctaaatatctagagtaaagaaactgaattaattatctgagcggcctcattgtgaatcactgtacactcaggaaccagactgagttgaaatcctgtctttgccacctattgacagcacgatcttaagtggattttagcctctgcctgtttctcagctgaatgtgagtttaataatagtgcatgccccaaagttgttggttaggaatcaatacatgaaaaacatttaagaatggtgccgggcacagtggtaaytgacatatgagcacctgcctctctctgctcagatacagaaggtggtcatggcactaggagactacatgggcgcctcctgtcaygcctgtatcgggggcaccaacgtgcgtgctgaggtgcagaaactgcagatggaagctccccacatcatcgtgggtacccctggccgtgtgtttgatatgcttaaccgsagatacctgtgtgagtaattcggttctccaatcccctgggtcactttgctcttgtgcacgctttccagtctttcagcgtaagccagagtcattcccaaggatgctggtttctctctgggggaagagctgctctgtgatggagcccatgcgtgtcatctgagcctctggcttccctgccagtgcagccctggcagtgtcctacttcccagggctgttgtctgcctggcgggaaggtcctgggcaaaggatcagtcyttgtactctgagagcagactacttggctcctctctgttttttatcagygaagttggatatmtctctcccacatttccctaatcatatgctatatattggctttttttttcttctctagcccccaaatacatcaagatgtttgtactggatgaagctgacgaaatgttaagccgtggattcaaggaccagatctatgacatattccaaaagctcaacagcaacacccaggtgagggcagtcttgcttgaatagctaatgattcttgaaaaatagtaagtgccaggggaaccawatactggattcttgagcctttttatgcatctgcttcagttttaggtgtggctagggaagggagcaggcctcaggaaggaaccagcactctaagactggcctttttttccactaggtagttttgctgtcagccacaatgccttctgatgtgcttgaggtgaccaagaagttcatgagggaccccattcggattcttgtcaagaaggaagagttgaccctggagggtatccgccagttctacatcaacgtggaacgagaggtggggcccagtgcaggaggcgggcctggtagtgagttgttgggtatagcccctgactgatttttgtcccccaacctccaggagtggaagctggacacactatgtgacttgtatgaaaccctgaccatcacccaggcagtcatcttcatcaacacccggaggaaggtggactggctcaccgagaagatgcatgctcgagatttcactgtatccgccatggtgtgtttgcccgctgccagcctgttgtgggtctgcccgtcagaagtgtcctacttgaagccagggttcctggaacccaggtgcctacctggtctgctgcatatttgttttctcttccagcatggagatatggaccaaaaggaacgagacgtgattatgagggagtttcgttctggctctagcagagttttgattaccactgacctgctggtgagtagagggaactgatagcaaaggcagaagggaggatccaaggtgattccctctccaaggggacatcagtgcctctcaggaaagtagcagcttggaatagaatctggcatgcctaaggcctttggggaactgggatgcttatttcctctgccttccttggctgcccacatggatgcctaagtgtcttccctccgggatagagtgtcctccgtgcacatgctgaagagttgtctttcttgacgtaggccagaggcattgatgtgcagcaggtttctttastcatcaactatgaccttcccaccaacagggaaaactatatccacaggtaagcgtagatctggaacactcccctaccccttcacacctggccctccctgggcttaaagctcctgatattcctcatccccttccttgttttccagaatcggtcgaggtggacggtttggccgtaaaggtgtggctattaacatggtgacagaagaagacaagaggactcttcgagacattgagaccttctacaacacctccattgaggaaatgcccctcaatgttgctgacctcatctgaggggctgtcctgccacccagccccagccagggctcaatctctgggggctgaggagcagcaggaggggggagggaagggagccaagggatggacatcttgtcattttttttctttgaataaatgtcactttttgaggcaaaagaaggaaccgtgaacattttagacacccttttctttggggtaggctcttgccccaggcgccggctcttctcccaaaaaaaaaaaaaaaacactaatccatttccctaacctagtaacctccagatcccagaggctctcctcacctcagctgagctcctttgaaagtgattcaagggactrtgtcactcagcctcatttgctggaccaaatctggagggagaacccctaaaacycctaagtgaggttgcccagggggttgtccccaggtggggggaagcaggggagagaaaatggtagccatttttacattgttttgtatagtatttattgattcaggaaacaaacacaaaattctgaataaaatgacttggaaactgcctgtttgggcttctcatttcttacctccccttccctctcccacctgctactgggtgcatctctgctccccccttccccagcagatggttacctttgggctgttgctttcttgtcaccatctgagttctcagacgctggaaagccatgttctcggctctgtgaatgacaatgctgactggagtgctgcccctctgtaaagggctgggtgtggatggtcacaagcccctcacatgcctcagccaagaggaagtagtacaggggtcagcccagaggtccaggggaaaggagtggaaaccgatttccccaccaagggaggggcctgtacctcagctgttcccatagctacttgccacaactgccaagcaagtttcgctgagtttgacacatggatccctgtggatcaactgccctaggactccgtttgcacccatgtgacactgttgactttgccctgacgaagcagggccaacagtcccctaacttaattacaaaaactaatgactaagagagaggtggctagagctgaggcccctgagtcaggctgtgggtgggatcatctccagtacaggaagtgagactttcatttcctcctttccaagagagggctgagggagcagggttgagcaactggtgcagacagcctagctggactttgggtgaggcggttcagccatgaggctggctgtgcttttctcgggggccctgctggggctactggcaggtaaggaggaaggaggctgaggggagggggcccctgggagggagcctgccctgggttgctaaccatctcctctctgccaaaagcccargggacagggaatgactgtcctcacaaaaaatcagctactttgctgccatccttcacggtgacacccacggttacagagagcactggaacaaccagccacaggactaccaagagccacaaaaccaccactcacaggacaaccaccacaggcaccaccagccacggacccacgactgccactcacaaccccaccaccaccagccatggaaacgtcacagttcatccaacaagcaatagcactgccaccagccagggaccctcaactgccactcacagtcctgccaccactagtcatggaaatgccacggttcatccaacaagcaacagcactgccaccagcccaggattcaccagttctgcccacccagaaccacctccaccctctccgagtcctagcccaacctccaaggagaccattggagactacacgtggaccaatggttcccagccctgtgtccacctccaagcccagattcagattcgagtcatgtayacaacccagggtggaggagaggtaaagctaaaactgggggatgagaggggagggaggcaggactggatataggctcagagggaagaaggaagaggggacagggaaccttggccggcatcgcatgcagtcttgtgaccttccagtctttaacttccgcaggcctggggcatctctgtactgaaccccaacaaaaccaaggtccagggaagctgtgagggtgcccatccccacctgcttctctcattcccctatggacacctcagctttggattcatgcaggtatagccatgwcctcagtctcacccctcactcagcctcccggcgcccctcccctcccaatcccacacgctactccttcctctgtggagagggataccacctgcgccttcctcttcgccccacaggacctccagcagaaggttgtctacctgagctacatggcggtggagtacaatgtgtccttcccccacgcagcamgtaagtaacctccttccctttctcattgctaccactagacgccagggttcctgaaaggactaagctggggccagggaggtggataggatctgacccttcctcactcctccagagtggacattctcggctcagaatgcatcccttcgagatctccaagcacccctggggcagagcttcagttgcagcaactcgascatcattctttcaccagctgtccacctcgacctgctctccctgaggctccaggctgctcagctgccccacacaggggtctttgggcaaagtaagacctacctactccttccctcctagaatcctcccactgcactgaaaaccccttccccaggcccataagccactcatctctcttcttaaccccccaaatctcgctctcccagcttgtcatggctacagggcagctttctttccatcctctacaagactctgccagtttcccccttttatcactgctgagtcactgcggtgagctcctcaccaatctcctactccccagcatccccccattccctcctcccacctttatcccaaccagcacgtcactgcaaatacctacctgccctatccttccgccaggtttctcctgccccagtgaccggtccatcttgctgcctctcatcatcggcctgayccttcttggcctcctcgccctggtgcttattrctttctgcatcatccggagacgcccatccrcctaccaggccctctgagcatttgcttcaaaccccagggcactgagggggttggggtgtggtgggggggtacccttatttcctcgacacgcmrctggctcaaagacaatgttattttccttccctttcttgaagaacaaaaagaaagccgggcatgacggctcatgcctgtaatcccagcactttgggaggctgaggcaggtggatcactggaggtcaggagtttgagaccagcctggccaacatggtgaaaccctgtctctactaaaaatacaattagccaggtgtggcggcgtaatcccagctggcctgtaatcccagctacttgggaggctgaggcagaactgcttgaacccaggaggtggaggttgcagtgagccgtcatcgcgccactgagccaagatcgcgccactgcactccagcctgggcgacagagccagactgtctcaaataaataaatatgagataatgcagtcgggagaagggagggagagaattttattaaatgtgacgaactgccccccccccccccccagcaggagagcagcaaaatttatgcaaatctttgacggggttttccttgtcctgccaggattaaaagccatgagtttcttgtcacatgcctttctatgccttccatggctgggtctcagggagccggaagcagctgctgaggagggatgaaaatgtcagtgtgtgacgatgcctcatgggttcaccccccaaagcctggcacagctggtgttgggtctgccgtgcctcccttccttcctcctcttggggccactggctgctccagttccccatccgtggcaagccggtagagccattcatccccgcagccttcttcctgaccctcgtacagtttcaaatgcagcagacagccaaagcaatgagtggggggctgtggaacttcattcccaaaggcagcgccagtggctcctgagcaatgagaatgtcctgtcctgtccaccatattcaaggccagcagaagagcccgattaaaccctcgcagcacctggcatgctcctatcccacctgcaaggggttgaatcaagaaggagcagtgggtactctgacctccactgggggctcctgggaacagcatgccccccacacggggccacctgccaagcctaacttcatgcccccagtacttgagatgaggagtgtcactctcaggacagccaaggtccagattctagaaaggacctcccagatggccacagcctgcaccagcagtgagcgccagtcccacccattacagctggctacggcgcaatccctgggagccaggatgagcagcaccccccagccgtaggagccccaggaggcttccggcctccaaggcccagagactgccccacaagggcagccctcacctggcagggccccagcagccccacctctgcctgcagacatccgtgtgaccttgtagactttggaggggggccgccaaagggctgatccacagcggaatgacgcacgggtgggcaccgtgggttggcgtcccggcggtcggtaacgaagcacaacgcccccaccaggtagtccaaggtgccctttcccaagcagcgctgcagggtccactcggcctcgccgaagtctctgcccagcacgtggtgcgccctcgggccagcggggagggggcgaatcccgggactgcctcgccaggcctcggctccccggagactcttgggggtctgggccccaagggtgattcaggtgctgcccttccccgacctgggctcgcctcccccacctcctcctctgcttcactgtcccgggcccagcagttgccggcgcactcatgctccgaggcctgagccaaccggaggcgagacaagcacagggccctgcgcgcaacccggcacctaaggaggcctgcccggtgcagactctcctgctcccaccggcgcccttccctctagagacgctgagagaacgggagctagtagcgcccccacccaacgccacctcggagactccggctccttctctctcaacttcgaacaatacaaagtgtgctaggagaagacaagatggcgcccagcaggaggagcggagaaaggcaggggtgtaaatctggcttccaaactggaagcgtcaacaaaggcgtgggaggtctaaccgcgcaggcgtgcagcttcggcaagctttacaattccaacagcgcgtccaaaacgtggtccctgactgagacttattttacgccactagagtgagggtgggtagcgtcagaaagagcggggcacggggcgggccagcttcgccgcgggaaaagaacgggaggcggagtgtccgcagcgcgcacgcgcaacgaaagtcaatggcggtctggagagactggcggaagctagctttgcaatayggcggccgaggcggacggaccgcttaaacggctgctcgtgccgattcttttacctgagaaatgctacgaccaacttttcgttcagtgggacttgcttcacggtgagttttattcagcatccgatccaagtcctactcgagtgaccgtgggcccttagtccaagccttgatcggcgactaagtgacggcagtgactgccgccatgccgagctggacggaagtcacttctgagaagggcggaagtgtctcgggctccttagagggaggacaccatattagtgccagtggggaagtcaccgggtggaattacttctttgtggagtttgtgctgtagcgacaatgaaaaacgaagagtcaacttttataaaacaaaataaaaattaagtcaaatcatgccaacctttattagatcgctagcagggttaaacttaattcaaagcccctgatgaatcgggccttcattgcacccccaaaggctccgccaccctgattgctttctttccagcctccaggtttgctcatagtctgatttcggaataatttgcctcccttcctttttctgattgcgagacagctccacaagggtcaccgtcagaccgtttggggagcgtcagtctgcccctgtcagttcatggtacctctcttgagctcgtggggcactttgttttagccgcattcatgacccgtgagagtcagactcccactagaccaagttccttgaggggaaggcttcaaggctagagaagttgtggatggccagggcataaaagcaagccttgaaagggtaaggtttagtccctgagtaggggccagggacagtcagagtgttcaagaaagagtggtatggggcgggcacggtggctcacgcctgtaatcccagcactttgggaggccgaagcgggtggatcacctgaggtcaggcgttcgagaccagcctggccaatagggcgaaaccccgcctctactaaaaatacaaaaaattagccgggcgttgtggcaggcgcctgtaatcccagctactcgggaggctgaggcaggagaatcgcttaaacccgggagacagaggttacagtgagccgagatcgtgccattgcactccagcctgggcaacaagagtgaaactccgtctcaaaattaaaataa

SEQ ID NO: 96145 - DNA, 34960 bp, Homo sapiens
aactattatggcgagtaacgctggtggctcttttgtcaggcaggagtggagggtggccctgattcttggggaaggaaaagtgtgtgtggggtattgtagcagggatgagccttacctgatgacaccgttcacactggtaaggcttttcaccactgtgcacacgcttgtggcgttccaggtggtacttctggatgaaacgcatatcacatatatcgcattcaaatggcttctcacctggcccaggtggacagagaagtgaatgtggggaggtatgtacagtagggacctcattccagttttctcagaaactttaactcttagtaatgtgtagacacctaagtgatcataaatggggagaggtccccaaaggtgctggtctcagtgacaccagatacaaagccatgcaatctctctgcttcattgacttatcttcttccttcatttctaatacttacccattaaaataaacccaactagagccacaaacagacatggaatacaagcgatagactattctcccccttttgaatataaacaagagacttaccagtgtgaataaggatgtgcctctttaggtggtaactgctccgaaaggctccaaagcagtgttcacaaacaaaatttttgggaatctttacttgaaaagaaccattttgttccactaccaccacctgggggcaataatcaggcatgtcatgaggccaccactgccctcttcctggagacactgttctactctgggtccacttccagctgttggagaaaggaacctctctgatgctgtctaaaggtgctgccatctcctgtactccatggaggtaagagaccctttggggaaggaggtggagtgggtaagctgtctatcctgtcaaacccagcagtctgagtatgacttgagctggagcctgcctgctcccatgcctcgggatctgggatctcatgctccccaacctgtaccattactgttccagcaaggcaggagatcaactaccaaggtagtctctggatgaaatctgggggactcactcactggctatcagagatcaaagcatctagggaaagctccaggttacatggtagagggaagaaggaggaatattaccccattaccaaactgtatgagtttgggggatcaccccattacctgcctttttaacagtcttttttgaatgagaggcctcagacaagctgtcatcatctttgcggctccgggacttatcactgtcttttcggtgaccctttgaagacaaatcaaatctaaactcatagcccatctcggaacatgagatgagacccaatgcagctctcagacaaaattcataaatgagagtaaaccacctgccccgaaagcttagaggaagtatacaactatttcctctccaagcacctggtcttaaaagagttgaaggcacacaaaagaccttccttagctttctgaaataccaatgttcatccattccccagttggatccccttgccccacttccctatgaggaagcatcaaggaatcagagcttggtatctcctggcagagagcttgggccacccgatccccaggtgccacaatggactcaagcgctgtacctgactcgagcacctcagcacatcagggctacctgcccgctcgccattctcggcctgcttgctggcaatctggctcagcatcatcttcttgctggctgcagtgggaaccaaactcacacctgctaggccttcacaagccaggagacttgcctaagttgaaaggagatgaggtgtcaggtcacctggcagggcagggcaaaaacagactgccatcctctatagaactaccttttacaccctgctacaaactgcttctctccagggaatgtccctcctcactgccaaagccttgcttccttcaagagtcctccctaactcatctcaccaggaacgacttatcttgtcatccttcagcatttaaatatagatcaagtaaataatcaagtattactgacacctttgtcatcagcactaggcagtgtgtggctacatatttctttgaaggtatttctaggccttaactgtgagtgggtatgaggttccatcttgctaacccactgacacaggagattccttcaggaccttcctccttcctccctcaacagccctcagctgggccgagtgcagtggctcacacctataatcccagcactttgggagaatgaggcgggcggatcacgaagtcaggagttcgagacaagcctggacaataggtgaaaccttgtctatactaaaaatacaagaattagccaggtgtggtggcacacacctgcggtcccagctactcgggaggctgaggcagaagaattgcttgaacccgggaggcggaggctgcagtgagccgaaatcgcgccactgcactccagcctgggcaacagagcgagaatccctccgtcactcacacacacacacacacacacacaccccttagcttcagagcgcgcgcgcgcrcacacacacacacacacacacacacacacacacaccccttagcttcagagcccacttttgattggcagatcttgctggtgccaactgtattttctatcggtttgtttcattttttgcttgttggttgagacagggtgtcactctgtcgcccaggctggagtgcagtggcacgatctcggctcactgcactcttgacctccctggcttaagcgatccttctacctctacctcctgagtaactgggacttcaggagaatgccaccacacccggctatttttttttgtatttatagagacggggtttcaccatgttgcctaggctggtgtggaactcctgagcttaaacaatcctccagcctcagtctcctaaggtcctgggactacaggctatttctccctttagattttaaactccctaagtatttaccaattgcaactgatatgatttttggagttcagcatttctcttgacctcttaggccatttatatgtgtgcttgtatgatcacattttttttcacattccttgctccatatataatttaaacaattacttaagtaaggtatgtttaagtaaatttccagaaaactgctacattcttcaaactgacttcggttagccggcattaaagaaaatacttttcttactgaaaaaaaaaattttaagaaatcgttggtcagcaaactcacaaatttatgaagaaattccttttagatgatcagtacgttctgggacccctccctccaccttctgggactttggagtgaaagatccagagttaaaatcttagctcagctgtttgcactctataatcttgggcaagttattccacctttgcaagccttagtttccttacatgaaaaatgcctgtcataatgcttatccttacagggttgatgaaaagtaaactaagacgtaaaacgcttaacagtgtctagcacaaagttcagtccttagtggaaggcagcattctcagaagactgaatacaatgctgagaagtgggttgcaaaacacaaaggaagaagaaactgacaggctcctattctatatggaaaggaggaagctgtgcattcagaagcagctggaggaaagccaattatactacaatcagactgccatcctggtgagactggtagggaggttccctagaagcaagctgggagaagctctggagatgtgtgcacatagctattctactcagatgactacaacagcctatctgctcattctgtctctccagtccatcctctacctccacaataatgaccttctacataacactgatctgatgctactctgctgcttaacttagcgaggcataaaaggcctttgggttacactctgcttactgcagggaacaacttcctcacctatcactgtcaatactacctccataactatccccatttaaatcccttactccgtaactatcaaacaacctgcagtactcggaacctcatcacattttcccatgactctaagctcctgcccatgctgttccttttgtccaaacacccttctcgcttgtttagcaaaatcctatgcatctttcaacctccatcttctttttctatccaagcagaagtactgttctctcctatgtacatacccctattattgcacattcctcaatcaacagattcagagtctctactactagccagccactatacaaggcattgtgaatataaaaataaatggctttccatccctctcccgaccccaactagcctggaagctcactggggacaaggacaatcgtattcatctttgtattcccagcacaatgccttgcatgcaacaggaactcaataaattcctgttggaaaaaaacaaaagmagcattcaccgtactattcactcccttacacccctcagcacttaatgtaccaaatgtaaactgagtacacgttgctttgcaaatgtcccatcagtgcctgtgatgcagtatagcctacctccttcatttgactggaagctccctgaaggcaggggctgtggcctgtctcctttccttcctctagatctccccctggtgcttaatacagagcttggatcactggggttggtcaatatgttgactaaggcagcattcaagagtgaaactgcaaacaggcttcccagttatcttggaggaggactctagagctttttacctgagccatgctgatttctcacttaaggcaacccaaaagttcaggagttcctaggtccacctttccttgagacactgtcgttttgaagaactgtcaccaaatcacggtagcgactccttcgtgtcccatcagtcctgttgccatattgaactttgtcttcaaatagaacttagtgtcctccgaagaaaagataggtgttccaagaatccctggactcygcctggctcctgcctattgtctgaagaaaaagagagtctaccagtcttggttttccagttgaattctcttgatgaagctcacgatctgtttcagaaacctgaaaccagaaaggaagaggggggctgctaaatgcaacatcttcaggccattacaacgtgcgatatgaattttttttttgctgggcgctctctgtgaagctcagaacgaggacatgagtcaagaagagttttctttctaggtcaataggaggaactggtctcctgggyaaggagtggaagccaacaggagcaaaagtaattggggcctcctatggaggaactctgccaaaaggaaagttgcttggatttgccatctcaggaatggaagaagggggcggagaccctttggggcttttgtgcccagtgggccggcccgaaaagctcgcactttacagaggcggcaagactagggtggaggaaagctcaagggccatcgctgggtgcttcggtggcgggcagaaacgggactggcagtgcccacacgtgtgcgttctccccgtccgcccgaaggtagggaaacttgctgcggaggtggaggacaggcaggcgaagcccggcgcggcgtgtcgcccgcctcgctccggccagccagcctctgcacccgctgcaccaaccgggagcagagccggagagtgccgagaagcgcgcgagatgcgtgctcgcgcccgcgtcccctccgagagccctctcccgggccggggacgcggcgggacgcgcgggcagggggcggtgtgcgcgcacggcctttcccctccctcccccggagatccccctcccttcgccacgcgcccctcctcccctcccctcccccttcccgcgcggcaccccacggcttgcgagctactgaagcgctgccgtctgtacggacgacgctgcggtctttggggcttgctcctacctgccaggcgcggcctcccgctggctccctggccgcgcggcgcctcctccaggccccagcacaccctgccaaccccaccgccgcggctgcccccaccgggaccgaggcaagtttacaaacaccaaccccggyccgtttccccggaagcacttccccctccccctcgtcctctccgccgagcggctgcatccacttccgggctcggcagctagactagcgggggcagcctcagagcgggtgagcttggggacgcacrgagaggtgcagctgggtgagtgggcggcgccgtgcgccgagggcatggaggagggagcgctgaggccggcgcgtgcgccgtggccggggcgcgccccggccgccatcgagactgagggcaggaccctcggcccttcgatgattgtacgctgggtgctcgatgggaggagggtttgctgggtgagctggttcagactccttgaaaaatcatcgtcactctttcttcctcgcggacgtcctgcccatcgctctgagccggcgccccaagtagagccagagtagttcgtacccagccttttcacgtaactcggccgaggtggtksttctccgaattttttccgtcaggcccagattagcagattttggggtcagctgggagaggcgttaacttttcttcgcacactcttgctttgtgcgctcaaccacagtctgaattctcgcagaggcgttccttgagtagcccktggccacactgctcacctccctgcagaagtcaaagccccagccctcctctgcgaatcccgaggccagcctggttggttaccttctccccttcgccctttactccaggccgtccagcatcaaacactagcctccacacgtggaaaagaccctgactcccacagtagactagtcttatgggagtcctggctcttgggccaggctgcattaggaaaatggaaaccagactgtcttcaaattcttctgcctagccttagccattagagagaggtcctgctaaagatggactgcaaatgcgcttgatggaaggagatgtcaattccactgaagtcctcatttctgctgtaggtgatattatgtcgtgactttaggagaagtaatggtgataccaaaagaaaaaaaaaactgtatgatgaaaaaaagacaaggattctcaacttttttttttttgtagacagatttcatttccctgagccactccatgatttgggccattgaaagtacgttttttgtgttttaggatcattctaaaatagagacaaaatggagaaagagagagataaagaaacatcaccaggaataagtcttttaaatcttttttgaaaattagctcctacttattttacaaatcgacacaacgcaaaagtataaaagacacaaaatggttattctccccctctacttatcccatgctcctgaagggaatcattcttaccagtttggtatatatgcttttaggcttttttctgtgttcatacaaaaatcttttcaaccagtatttattgagcacctgtaatgcgccatacagtgtattttagacatctgagtcagctaacatttaaaaaactgttgcacagtattccagtttatgtgtgtgccttgtcccatcttgatgaacatttaggtttcagatttttttgctttataaacaatacaataatgaacatccttaaatagttatctttttgctccgggcagggtggctcacacctgtaatcccagcacgttgggaagccgaggtgggcggatcatctgaggtcgggagttccagaccagcctgaccaacatggagaaaccgcgtctcttctaaaaatacaaaattagccgggcgtggtggcacatgcctgtaatcccagctactcgagaggctgagtcaggagaatcacttgaacccgggaggcgggagttgtggtgaggcgagagtcgtgcctttcctgggcaataagagtgaaactctgtctcaaaaaagaaaaaaaagttaccttttgcatttataaggatttatagataggatatgtgcttttatttaaatttatttttatttttatttttttttgagatggagtctcactctgtcacccaggctagagtgcaatggcacaatcttggctcactgcaacctccacctcccaggttcaagcaattctcctggcttagcctcctgagtagctggcgcctgctgccagcccggctaatttttttgtattttttagtagagatggagtttcaccatgttggtcaggctggtcttgaactcctgacctcaggtcatctacccaccttggcctcccaaagtgctgggattccaggtgtgagccaccacacccggccctattttcattctgtttaaagatagggtcttggtctgtcgcccaggctggagtgcaatggtgcagtcagggcacactgcagcctcaacctcctgggctcaaggaatcctcccatcttagcctcccaagtagttgggactacagatgtgggcaactgtgcctggmtaattttgtagttttttttttgtttttttgttttttgtagagacagggttttgccatgttgcccaggctggtctcgaattcctaggctcaagctatccattggcctcggcctcctagagtgctaggattacaggattgagccaccatgcctggccggatatgtaaattttaatagattctgtgaaaatgaattgtaaaagtttgtaacaactcccatgtttactcagaaccatgtgtgaatgttccctattcctacaactttggcaatgkttagtgtatgctatgaattttttatacagttactagtttaatgggtgaaaaatagtatttgttttaattttcatgtcattaatagtgaagttaatattctcttattgccttttttttttttaagagatgggtctctggacaggcacggtggctcacgcctgtaatcccagcactctgggagaccgaggtgggcggatcacctgaggccaggagtttgagaccagctgggccracatggagaaaccccatctctactraaartacaaaaaarttagctgggcttggtggcacgtgcctgtratcccagttaccrggtggctgaggcrggagaatcacttgaacccgggaggcgggggttgcrgtgagcccatattgtgccattgcactccagcctgggcaacaagagcgaaactctgtctcaaaaaataaataaataaataaataaataaatagatgggtctccacgctttgttgccttaggctggtttccarctcgtgrgctcargtgatcctcccrcttcagccttccaaataggtgggactattttattgctctttgaccattttaattgtttttgtaaactgtctgttcatatcctttgcccattaaaaaaaggtagatcatttgtatatttcttattgatggtagaaatcctgtctgtgttatggataataactattctttgtcgtctgcatttaaaatattttctctttttcacttatctttcagcttttgagacaaaagtcatgctttatgggaaaatatttgaaacatttctgtctttgctaggaacaagccagggatgtttactattaaaactaagattttaggagagctcctggccaccctaaagcctccttgatttcatatatattcatcttacaaagagaaacgattgacaatgtatcaaaactatggagttcagcaacatgaccagatgtcagattaacaaacaaaaattatataaataaaatataagaatataaccaacactaaaataccatagaataaataatctgattcacaataaaaacattatattttggccaggcgaggtggctcacacctgtaatcccagtgctttgggaggctgaggtgggaggattgcttgaagccaagagtttaagaccagcctgggcaacatagtgagaccctgtttacaaaaaattaaaaaattaacccggcatgctggcatgtgcstgtagtcctagctactcaggaggctgaggtgggagaattgtttgagcccaagagttcgaagctgcagtaagacatgattgtgctactgcacttcagcctgggtgatacagcaaaacttattctctaaaataataaataaatattttttttttttttgagatggagtctcgctctgtcacccaggctggagtgcagtggcatgatctcggctcactgcaagctccgcctcccgggttctcgccgttctcctgcctcagcctcctgagtagctgggactgcaggtgcccaccaccatgccgggctaattttttgtatttttagtagagatggggtttcaccatattagccaggatggtctcgatctcctgacctcgtgatccacccgccctggcctcccaaagtgctgggattacaggcgtgagccactgctcccagccccttctggtattcttgtttttttttttgagatggaattttgctcttgctgcccaggctggaatgcaatggtgcgatcttggctcactgcaacctctgcctcccgggttcaagcgattcttctgcctcagcctcccaagtagctgggattacaggcatgcaccaccacacccggctaatttttgtatttttagtagagacrgggtttcaccatgttggtcaggctggtctcgaactcctgacctcaggtgacctcaggtgatccacctgcctcggcctcccaagtgctgggattacaggcttgagccactgtgcccgcccctcacccccccttcttgtattcttatggttgtatattttcagtttctgtctttatcttagctgcagttaatttttgtcaatgatgagaaatagtgagaaatgccacacggacctgtgatgcagtggaagaggtagcctaaagtcagaaagtcagtgatctaggcttgttcccatgtcacctttgtaattttggacaattagttcaccttctttcagctaagaatcctcatcttgaaaacaagaatgaataaatacctatttaggctaatttctaatactattgtgaaggtcaaataagataataaatgagaaggaaaaacaccctttgcaaatctattatcattactacagattcttggttgatgcaaatcaaatgtaagtagaatgcagcattttttccagtacctgcaaatcattgattgatttaacaaatgtttatgtaatgcctctgtgcaagtccctgggggaggggagaggacaatcaagaagatggaaactaacatttgaggggtccctgttttctattagtttacttaatgaaggaaaagacttagttctctccacccaggagagtacagtctagaagcagagaaaagattgtatacataggagagtttgtgcctttattaatgtgggtgtggagccactagggtttgttgattgggagatagcacagagtactttagctttctaaccataaacctggctgagagcgcttcaggagacaattgcctagatccctttgtccccaggcaggcctcctcctgtgtgaccttccctaactccctcttccctcaggcccactccatcacttattcaaatagcattgcaatgactcctgctgagtcttttcctgcaccagctctctattgccttaaggagagccttagtgttttgtccttgaagcctgtcctgggccagttgaactttcctgcctttccatggtgacctctcaactccctcttgtggcaatttccctttattttacatgcaggtctctcttgccagcctgttagctggagcccacagggcagatgcagcacctagggtaatgccagccaggcgctcagaagtagacaacactcagtcaatgtttgctgaacaaactgaacccattcccttccctgagagccagcgggggttgaggggttgcgtaatagagatgagcagtgtgtggctccctttgccttccattagacctttgataacagtggattgaggagttgggaaaccacatgatgtgcaagggacattccttgagcctgatgatttgtatattttagaattcttgtacccccttaattcctccatatatatatatatttttgaaatggagtcccactctgtcgcccaggctggagtgcagtggtaccatcttggctcagtgcaacctccgcctcacaggttcaggtggatcctgcctcagcctcctgagtagctgggattacaggcacccgccaccacgcccggctaattgtgtattttttagtagaaatgaggtttcgccatgttggccaggctggtctcaaacccctgacctcaggtgatccacccacctcagcatcccaaagtgctgggattacaggtgtgagccaccacacgcggacaatttttatattgtttaaaaagaaccgttattttaattccataagcaatgtgaaatgattgtataaagttataaaaatatagatgtgtataaataataaacttaaaaatcatccataacaacacccagaaatagccacaaatgaatattttgaagtctttttccttctttttcagtattttctttttttcttttttttttttttgagatggagtctcgctctgtcgcctaggctggggtgcagtggcgcgatctctgctcactgcaagctctgcctcccgggttcacgccattctcctgcctcagcctccagagtagctagctgggactacaggggcccgccaccacacccggctaattttttgtatttttagtagagacggggtttcaccgtgttagccaggatggtctcgatctcctgacctcgtgatccgcccgcctcggcctcccaaagtgctgggattacaggcgtgacccactgcgcctggcctgtatgacccgttttacatgaaatggccagactagacaaatctacagaaacaaagtagattagtagttgccaggggtcggggaaggggagaatgggaaatgactgctactgaggtttttttttgggtgatgaaaatgttctggcgttagatagtgatgatggttgcaacaactttgtgaatttatgaaaaaaacacttaattgtacacttttcaccccacttcctctgccatcttggtcctgctgtcctgaggagctacctgtgcaccctgcctccggctctcctgagcagagaggtaagcttgtctctgccttaggtggaaatggccactagagtccacttgctcagcactgactgccttttctctcccacctgttcccactggttttctccctgggcactctcacttgcccttgtctgtgcactggaggccgagactgagctgcagggtttgggcctcaggcccgtttgggagaggaggctcctgctgggtaggtccgggaagggttgacaggctgagtagggaatgactctgctctgccacagatcctgatggctgactcagaagcactcccctcccttgctggggacccagtggctgtggaagccttgctccgggccgtgtttggggttgttgtggatgaggccattcagaaaggaaccagtgtctcccagaaggtgagtcctttcttcctcctccttcccatcaagctttctttcttttcttttctcttttcttttttcctttcttttctttctcccccccccttccttccttctttcttccttccttttttcctttcttcctttctttcttgacagagtctcgctctatcggccaggctggagtgcagtggcacaatcttggctcactgcaacctccgtctcccgggctcaagcagctctcctgcctcagcctcccgagtagctgggattacaggcatgtgccaccacgcccggctaatttttgtatttttagtagagacggggtttcaccatgttagccaggctgctctcgaactcctgacctcaggtaatctgcctgcctcggcctcccaaagtgctgaggttacaggcgtgagctaccacgcctggcccaagccttctctttctctttccaaatctggctcagaactttcctcctttgataagatttctccccagaattcatccctgcccccctgggtacctcagggatttacattctgggtcttactgtgttcactactcttgttcattttcagagttttgctttggaaatatcccgaagttgtttttagtgcaggttggccgtgtctcgtgtctgtggaggtgtggtttgacagccagtccacaggcatcccaggcccccagcatccccggctctcttcytaggtctgtgagtggaaggagcctgaggagctgaagcagctgctggatttggagctgcggagccagggcgagtcacagaagcagatcctggagcggtgtcgggctgtgattcsctacagtgtcaagactggtgggccctggcttctgtgaggaggagacttgggagtttgccctgagctctactctgagctccctggcttactctccttctccrggtcaccctcggttcttcaaccagctcttctctgggttggatccccatgctctggccgggcgcattatcactgagagcctcaacaccagccagtgagcatcccaaggcccctctaccatcccacaaaggatttaggtttgctagagaggtgcctgaggggtaggggaggagaatggttctgccctctctctactgcttctgggaatccctgtcggcagagagtttttcctcatatcctttggacccactttctccaaactttctcaggcctcctgacccctgttttctctttcttgcttccctggttctgtcaccaactcgttcttctccttggactgttgctttgctcactcttcactgcctcctttttgtgactcctgtgcagtttaagggcctgtctgggcagtccctccccatctctcctttctcgtcgttctctctcctggcaggtacacatatgaaatcgcccccgtgtttgtgctcatggaagaggaggtgctgaggaaactgcgggccctggtgggctggagctctggggacggaatcttctgccctggtttgtgagaaggaggaggacctttctttgccctttttatgagttcctcctcccccaccgttctcttgctctagtgtctggcagggagggatgattcctctttgattcctctccagctggacccaggccaggccagggaggcggctgcctggtcccttcatgctcatgtttgtcaccattccctggggtcagtggtctagttcctgctrtctccggacgggggctgtctcttgggggcagccccagatgtggagaggtgtggtcaagaggatctgctgatcctggatccattctgggatggtatgatcctgagaattgtggcctgggagccagtcatacctgcttctttgatgagctcttctggtagaaagggaagggaggcaagctccagtcttgacccactgctccttcctcttgccaccrccccctccctgtgacaggtggctccatctccaacatgtatgctgtaaatctggcccgctatcagcgctacccggattgcaagcagaggggcctccgcacactgccgcccctggccctattcacatcgaaggaggtggggaagaggcacaggcccaaccctgggctcctgattctaatctccagccagctaagtagagaccttccaggtcttctccctgccctccctacatcctccaaggccagcctgcccccaggcggatgtgcttccttccaatcaaggaggtcaagtaactgctcctgttcacattgccttctgtttgggggcagaggaggggccgtgagtgcagtggacacagtccatactcttcctactcaagagtgtggtctgtggaccagcagcattggtatgacctggggcttgttagaaatgcagaatctggccgggcacggtgactcacgcctgtaatcccagcactttgagaggctgaggtgggtggattgcctgagctcaggagtttgataccaccctgggaaacatagtgaaaccccctctttactaaaatacaaaaaattagccaggcatggtggtgggcacctgtagtcccagctgcttaggaggctgaggcacgagaattgcttgaacctgggaggcggaagttgcagtgagccgagatgacaccactgcactccagcctgggtgacagagggagactcttgtctccaaaaaaaaaaaaaacaaacaaatgcagaatcttgggccccaccctagaccccagacctagtggaccagaacctgcatttcattttaaccagacacccaggcgattcgtatgcacgctgacatttgagaagccctggtctacaggatcccatttgttggagctcacacttgacttttaccttctctcccctcccccatcaagttgtgctaacttgccctctgccttcccccacagtgtcactactccatccagaagggagctgcgtttctgggacttggcaccgacagtgtccgagtggtcaaggctgatgagaggtgaaggtccttctgcccacatggctgtgacctagctttgcacagcgtamcttcctgccgccagaaagctctggcatcagacccttaccgctggtggacctctctcccctcgctattcagtagaattgctgttcctgtctaccagagcctgccagcgtctcccacctctgccctgagatctgtttcaccccctgagggaaaaactagcactgttgtctctgcattgctaaccccaccttaccctgccttcaacagagaacctgtccctgctctaccctctgcattttctttttcagagggaaaatggtccccgaggatctggagaggcagattggtatggccgaggctgaggtgagtcagtgaggctcgctggggtgatatagcctccaactgtcttggagggttatttgggctctcctttctcaaggcatccttcatccctctcgtctccatgcccatctcccctgtgggctgaagtgaccatggagagcctgggggtgaggacactacattgctttctggggctctgcccagacacctacgccgggttggattctgagaggcagggctgagtgagggagcgagtcccaggcagcaccacagggagggtgctgggggcctgcgctgtagtgtggaaggttcctgtgggctgtgagggtctgcgcagggagaggctgaggaggggagaggcactggtgaaggctgtgagtagtggggatgaggggacattagcactctcctctacttcgaggggtatgtaactgctacagccaccttggagggcattttggcaccatctatacaattttatttatttttattttttaatagtttttgagacagagtctcactcagtcacccaggctggagtgcagtggtgtgatctcaaaaataataataataaataaataaatataaatgtaaaaattttttttttttttttgagatggagtttcactcctgttgcccaggcaggagtgcaatggcgtgatctcgactcactgcaacctccgcctctcaggttcaagtgattcctctgccttagcctcccaagtagctgggattataggcgtgtgccaccaggcctggctaattttgtatttttagtagagatggggtttctgcatgttggtcaggctggtctcaaactcctgacctcaggcgatccgcctgcctcagcctcccaaagtgctgggattacaggcatgagccaytgcacccggccattttttttttcttttttgagacagagtctcgttgtgtcacccaggccggagtgcaatggcacgatctcggctcactgcaacttccacctcccgggttcgagtgattctcatgcctcagcctcctgagtagctgggattacaggtgtgcatcaacacgcctggctaatttttgtatttttagtagagatggggtttcaccacgtcggccaggctggtcttgaactcctgacctcaaacaatccacctgcttcggcctcccaaagtgctgggattataggcgtgagccaccatgcctggccataaatgttttaaaaaaaaatttaaatgtccattagtagacaaaataaattatggtatatctatgtgtcttagttccttcctctgtaaaatggacagagtatagaatttgccacatagggttattgtaaggattgaatgaattagtatatgtaaagcacttagaatagttcctggcacatagatgcactgtataaatacaagctactggtattgttgktattattatttattactattattagagtactgggtagccatttaaaagaataggtgagaatatatatactaacatgaaagtatctccactgtatatattaaatatttattgcaaattgccgtatagaatggacattatgagccctatgagcccatttttgttatttagaagagtatatattattgatatatggatgttacctctgagtagcagtaagggcagcaattagaatagtgatgtttctctttttattatagaaacttttttggtaatagttttattgatatataattcacataacatataattcacctaacatataattcacccacttaaagggtactatttagtggtttagcatatttgcagagttgtgcaaacatcatcacaatcagtattagaacatttttatcaccccctaaagaaaccccataccctttagccatccctctgtaattctcccaaagctcccagttctaggcaaccagtaatctacttagtgtctgtatagatttgcctgttgtgaattctggaatcatattatgcatgccttttgtgatgagcttcttttacatagcataatgtcttcaaggttcatccaacctgtagcgtgtatcaacccttcacttcttttatggccaaataatattcccttaaatggatataccacatttatttatccattcatcagttgatggacatttgggttgtttccactttggggctcttatgcataatgctgctatgaacatttgtatacagatttttgtgtgaaaatacgttttcatttatcttggttatatacctaggagtggaattggctgggtcatatagtaactctgtatctaaccttttgagaaactgccagactgtcttccagagtggctgcaccagtttacaatcccaccagcagtgtgtgagggttccaattgctctacatactcaccagcacttgtcatatctttttttgattataccacttagtgggtgtgaagtgggatctcactgtgttttgatttgattttccctgatgactaatgatattgagcatcttgtcatgtacttattggccatttgtatatcttctttggaaaaatgtctattcagatccttcacccattttgtttttcatagaatttttattccagtaaggaagactgacattcataaatatatgtaaaaatgctgcatatgtgctatgaaggtgaggtacattgtgctctttgagcatagaatacaggagaattgacctaatcaggaggtgaaggagtcagggaaggcttccctcagaagggatggttgagctgagactggaagggagaaaagaaatgaactaggtggtgcccctttgggtagacaagaagattctgtgtatgtgcagaggccacgggatatttctggaattgaagatatggagttggagcagcttcccccctttgcctggactgtttccaccccacctgtagtcttcctcatccatggatacttgcttggggctggtgctgccatctacccccactctcctagtcatcaagtgggcatttgaagtgtgtggaactgttttattttgctttgttttgtgacactagccagagggcattactgtgtttattgagagggaaagagggatcctaaacatttttgtaatgagcaggtatagctctacatgaacaagaactgactcacccaacatgccagtagagtctctgttgagaatctgctgccagttctacttgtttttttgtgtgtgtaacataaaatttaccatcttaaccatttttacatgtacagttcagtagtgttaaatacattcacattgttttgcaaccagtctccagaactcttttcatcttgtttttttgttttgttttgttttgtttttctgagacagagtatcactctgtcccccaggctagagggcagtggcacagtctcagctcactgcagcctctgcctcctgggttcaagcgattctcgtgcctcagcctcctgagtagctgggattacaggcccctcgccaccaaacctggctagttgtatttttaatagagatggggttttgccatgttggccaggctggtctcgaactcctggccttaagtgatctgcccaccttggtctctcaaaatgctaggattacagtcattaaccaccacacccagcagaactcttttcattttataaaactgaaactccatactcatcaaacaacaactcattaccccctcttccagcccctggcagccaccattctactttctgtctccatgactttgactactctaagtacttatataagtggaatcacacggtatttgtctttgtcttttcttttcttttttttttctcgagatggagtttcgctcttgtagcccaggctggagtgcaatggtgcgatctcggctcaccgccacctccacctcctgggttcaagcarttctcctgcctcagcctcctgagtagctggggttacaggtgcgcaccaccatgcccagctaattttttgtatttttagcagagacggggtttcaccatgttggccaggctggtatcaaactctgaccttgtgatctgcctgccttggcctcccaaagtgctaggattacaggcatgggccaccgcacccggtggtatttgtctttttcgattggcttatttcacttagcagaatgtcttcaaggttcatccacgtcgtagcatgtgagaattttcttcctttttaaggctgaataatatttcattgtacatatatgccatattttgcttatccatttatctgtttgggttgctgtttggaatctctttgagaccctgctttcagtgttttgggtgtatactcagaagtggaattgctggagcatatggtaattctattgaatttttttgaggaactgccatactgttttctatagtggctgtaccagtttacattcctgcagtgcacaagggttctaatttattcacatccttgtcaacgcttgttattttcttcttcttctttttttttttttttttttgagatggagtcttgctctgtcacccaggctggagtgcagtgtcgtgatctcggctcactgcaagctccgcctcccaggttcacaccattctcatgcttcagcctcccgagtagctgggactacaggctcccgccaccacgcccagctaatttttttttgtatttttagtagagacggggtttcaccgtgttagccaggatggtctcgatctcccaaccttgtgatccacccgcctcggcctcccaaagtgctgggattacaggcgtgagccaccgcgcctggccaacgcttgttattttctgttttgttttgttttttttttgagagagggtcttgctctgtcacccaggctggagtgcagtggtgcgatcatggttcactgcagcctcgacctcctgggctcaaatgattctcccatctcagcctcccaaggagctaggaccacaggcacaggctgccacacttggccaattttaaaaattatttttggtagagacacatctctaccaaaattccatttcgctgtgctgcccaggctggtctcaaaactcctaggctcaagccattctcccacctcagcctctcaacagtactgggattacaggcatgagccatgcatcccctcattttctgttactttgatagtagttatcctaataggtgtgaggtggtaactcattgtagttttgatttgtatttccctaatgattagtgatggttgagcatcttttcatgtgcttattagcaatttatttatctttattgaaaaaagtctagtcagatcctttgcccattaaaaaaattatgttgtctttttattactgagttgtaagagttcttcatatattctagatgcaagtcccttatcagatatatgattttcagatatgttctttccattctctaggttgacttttcacttttttgaaacttttattttggattcagtaagtacatgtgcaggtttgttataagggtatattttgtgattctgaggtttggggcacgattgaacccatcacccaggtagtgagcatagtacccaataggtatgttttcaaccttttctcccctccctcccgcttcttatagtccccactgtcttttgttcccatctttctgtccatgtggactcagtatttagctcccacttatgagaacatgtggtatttggttttctgtttctgtgttaactcacttaggatactggcctccagctgcatccatgttgctgcagaggacatgatttcattcttttttatggctgcataatacttcatggtttgtatatgccacattaaaaaaaatctaatccactgttggtgggtacctaggttgattccatgtctttgctattggacttttcacttttttgatagtgtcctttgaagtacaaaggttttaaattttgaagtccaatttatctgttttttctttggttgcttctgcttttggtgttatatttaacctaatccaagctcacaaagatttactcctatattttcttctaagagttttatagttttagccctgggatttaggcctgtgatccaatatgaattaatttgagggtgtgatgtgagaaaagcattcaaactgcattgtttgcatgtggatatccagttgttccaacaccatttgttgaaaagacaattctttctttaataaattgtcttggcatccttgttgtaaatcacttgactgtaaatgtgagggttatttctgggttctcagttctgttccactgatctacatgtctatcctgtagactacattgtcttgattcagctgtagctttgtagtatgttttgaaatcaggatgtgtgagtcctccaactttgttcttttcttcaagattgtttttcgctagtctgggtttcttgaatttccatatgaatttaagatcagcttgtccatttctgcaaagagggcaactgggattttgataggaattgtgttcattcatcaacatgaaacatattttcatttatttaggtctttaatttccacagtgttttgtagttttcagagtatatgctttatacttcttttgttaaatagattaagtattttattcttttttggtgtttttgtaaatgaaattgttttcttaatttcatttttagattgttcattgctaatgtgtatagagatacaattgatttttgtatattctgtcttttggaagagtttgtgatctgttaccaatttttcattaaatgtttgatggaattcatcagcaaagccatctctgcctgggcctttcttttctttttaacttaaaaaaaatggagacagggtcttgctctgttgctgaggctggagtgcagtggcacgatcagggctcactgcagccttgaccacctgggctcaagtgatcctcctgcctcagactcccactgtggtagattttttttgtttgtttttggagacagggcctcactctgttgaccaggctgtagagcagtggtgcaatcatggttcactgcagccttgatctcccaggctcaagtgatcctcccacctcagcctcccaggtagctgggactataggagtgcacccctatacacctgtctattttttttcttttttttttttttgagacagagttttgctcttgttgcccaggctgaggtgcaatggcgtgatcttggctcacagcaacctccgyctcccgggtttaagccattctcctgcctcaacctccagagtagctgggattacaggcatgtgccaccatgcctggctaattttgtatttttagtagagacagggttgttccatgttggtcaggctagtctcgaactctggacctcaggtgatccgcccgcctcggcctcccaaagtgctgggattccaggcataagccaccacgcccagcctatgtatttttttttcgtttgtagaggtgaggtctcactaggttgcccaggctggtcttgaactcctaggctcaagcaattctcctgccttggcctcccaaagtgctgggattacaggcatgagctaccacatccagctgtagtagttttaaaaattactaattcaatttctgcataaacttttgtactattcaaatttatttatttatttagagacagagtttcactttgtcacccagactggagtgcagtggcacaatcttggctcactgcaacctctgctgcccaggttcaagtgattctcctgcctcagcctcctgagtagctgggattacaggcgcctgccactgtgcctggctaatttttgtagttttaggagagacagggtttcaccatcttggccaggctggtcttgaactcctgatctcgtgatccacccgcgtcggcctcccaaagtgctgggattacaggtgtgagccaccgtacccagcctatttatttatttttgagacagaatcttgctcttttgcccaggctggagtacaatggtgtgatcttggctcagtgcaacctctgcctcccgggttcaagcgattctcatgcctctgcctcggcttccgcctcccaagtagctgggattacaggcgtgcaccaccacacccagataatttctgtattttttaatagagacggggttttgccatgttggccaggctggtcttgaactcctggcctcaagtgatccacctgccttggcttctcaaagtgctgggattacagktgtgagccaccgtgcctggcctatttgtttatattttttgaggcaggctttcattctgttgcccaggctggagtgcagtggcaaaatcatagctcattgtaacctcaaactcctgggctcaagcaatcctcccatctcagcctcctgagtagctgggactacaggcatgcccactacacttggctaattaaacaaaaaaatttttttagagatggggtcttgctattttgcccaggctggtcttgaactcctggcctcaggcaatcctgccttggcctcctgaagtgccgagattataggtgtgagccactatgcctgactcaawtttttttcaatagcattggatcttccagtaaaacattcaagttctttgagagtatgagctttggaaatgaaaacctaggttcgaagtccatctctgcagcttctgcttggatctttgaatctcagtgtccctggctgcacattaaaaaggacagtaacacattgttgtgaggttgaaatgggccattttaggcatgcaaagagcttagagctgggcccagcatcaggctctgagtagcttttgagatgactttacatctttctccctctacattttggcaacagggtgctgtgccgttcctggtcagtgccacctctggcaccactgtgctaggggcctttgaccccctggaggcaattgctgatgtgtgccagcgtcatgggctatggctgcatgtggatgtgagtgggacttcggcttgggggtgcggtggggtgggctgagccaaggccaaggcccacgttgttcctcctgctccacaggctgcctggggtgggagcgtcctgctgtcacagacacacaggcatctcctggatgggatccagaggtgcatacagtccccttcttcccaaatcccgcccttcaaaccattggtccagagaatcatcatggactagggagtttaacatggctggggtaggaggctgaggggagggggactggagagaggattgattggagctgggaggtcagacatggcagttcttcctgatgctggggtgagggtgagaccaaagcccctttgctggggacctggaaaaggaggaagggctctggttgggcagctggaggaggagccactgacctgcctttgctccaccccatccagggctgactctgtggcctggaatccccacaagctcctcgcagcaggcctgcaatgctctgcacttcttctccaggatacctcggtgggtctgcccctgcccctgcaccagccccacctctctctggagctctgccttctctatcccaccttagataaagttcaggcctttctctattctctttaccatcccttctgaagctgcatctcagctaccaccctaacctgtattaggctccttcactcccccagtggcctctcttaaaagaaaagtttccagcttgaagttggagtcagaggtatcctggagtttctagcttgaggttgccatcagagtttgggaagaacyctgggtattgggaggaaacccaaagaaaggtgttggagccagcaggcagccgtcccagcagtgccatctggctccagggaaagaagagggtatcctgagctaagacccccacagtgcagccctggaggaaagcctcggtggagagggtagggtctgacaatctcctcacccccacacagaacctgctcaagcgctgccatgggtcccaggccagctaccttttccagcaggacaagttctacgatgtggctctggacacgggagacaaggtggtgcagtgtggccgccgtgtggactgtctgaagctgtggctcatgtggaaggcacagggcgatcaagggctggagcggcgcatcgaccaggcctttgtccttgcccggtaggcgggaggaggtggggggtcgtccctgttcccctctcctgggtccatgcccctccctctttcctgctcccgggattacttttctctcggtctctctgtggctcattctacgtgggcctcttctgtctggatctctgcttttcctccccgcctatggtttctcactctctgttcacaggtacctggtggaggaaatgaagaagcgggaagggtttgagctagtcatggaggtaggacccctttctattttgtggcccctgccccagcctagctcttttgcagcccccaagccccaactaaagccctagtggagggaaaagggcagggagaggggaaaggggcagggagagggaaaacggtccccctttctcagctcacacyttcctctttctcattcctctcagcctgagtttgtcaatgtgtgtttctggttcgtaccccccagcctgcgagggaagcaggagagtccagattaccacgaaaggctgtcaaaggtaggcgtgctgtgctgctctcyttacccgttagggagctgatgcaactgatgcgcttctgccccctgttggctgggagtggcatggcaggtctccttgctggtctcttgctctgaggcgtggatgctctcttttcggtaggggtggggatggggaggaaggtatgtttctgggragtaagaagcagcgacgtgtgttacaggagaagtcagagaagtcaccagtgtgtagtacacagagccttgtgctggcaattgggctgggaactcaggcccaggacagatatgaggcagaatgatcatggaaaagccttattacccgtgctagggacacagcaacccgagaaagccagtctagaagtgccatctggaggcgaggagctgtgttatatcctggtccctaaagatagagtggtactaggtgctgcagatgatctgaaaggacaaatgttcttgcccttatggagttgttattataaggcaagagttacctacttggaagcaatgtgttcaaggcagtgttgtaaattacttgctagatcacagggcacagattaatattatcaaaaatattacaggaattaagagaggggagaagaaggtgttgactaaggcttagatgaccaaggcttgaagttagactaaagcagtgttaggaatcaagagaaagtcaagatttggcagaaaatgtcccacaggacagatttcttggagacaggagaaatggggagaaaagcagaagatagmgaaggccaagcaggttagatatgacagaaaggtaaactgaggccaaggtcaaggtctgagcaaggtgtgctacccccagaaggtggctgggtgggaaggaaaagcacctctggaagcctggcaggacaagaagccagcctacctgtcagccgacccaggctgcagctggaatctctctccaccctyccacaggtggcccccgtgctcaaggagcgcatggtgaaggagggctccatgatgattggctaccagccccacgggacccggggcaacttcttccgtgtggttgtggccaactctgcactgacctgtgctgatatggacttcctcctcaacgagctggagcggctaggccaggacctgtgagccttctctgtcttgctgccggccttgataccacccctcacccgcagagtcactgcattccctcccagcctttgaggccgggtgcagtggctcacgcctgtaatcccagcactttgggaggccgaggcgggtggatcacttgaggtcaggagttygagaccagcctggccaataaggtgaaaccctgtctctactaaaaatacaaaaattagccgagcatggtggcctgtgcctgtaaacccagctactcaggaggttggggcagaattgcttgaacccagggggcagaggttgcagtgagccgagattgcacccctgcactccaggctgggcaacagtacgagactctgttccaaaaaaaataaaaaagaacagcctttttaggccacagtgacctgcgcaatgtttatatgctttgacctactaactttctcctaactaaatatttgattttaggagagtgtttaaataaattacagtatgtctatatgatgaaatgttattttgccattaaaattttgtttacaaagataatttttattgacataaaaataactttaatgtaatttatgttgaaaaagctgaatacaagtctttatatagagtaatatttgagctgtgttcaaaaatacataggaaaagactgataaaatgaaatatggcaaaatgttaatagttttccctggaataggataataggcaattttaaaacagactcctttaaaaaaacaaacaaacaaaaaaaacatagacttctttatatcttttgagctccctcccttttattatgtaatgaatatgtgttgcttttgtaataggaaaataataaagttaaaatttcaactgcattcttttggtatgtttttaaaatttattaacattcaaccggccgagcacagtggctcacgcctgtaatcccagcactttgggaggccgaggcgggtggatcacctgaggtcaggagttcgagaccagcctggccaacatggtgaaactccgtctctactaaaaatacaaaaattagccaggcatgatggctggcgcctgtaatcccagctactcggaaggttaaggtgggagaatcgcttgaacccaggaagcggagcttgcagtgagctgagatcacgccatcgcaccttagcctgggcgacagagcgagactctgtctcaaaaaacgaagcaaaacaaaacattcaatcaaataatgaggatctttatttttttttttaaacaagatgtggccaggtgtggtggctcatgcctataatcctagcactttgtgaggctgatgtgggagaatcgcttgagtctgggagttcaagaccagcctgggcaacatagcaagaccccatctctaaaaaaagaaaaattttttaaaattagccagacatgatggtgcacacctgtggtctcagctgtctcagaggaggtggtaagattgcttgggcccaggaggttgaggctgcagtgagctgtgattgcatcagcactccagcctgagtaacagcgtgagaatttgtctcaaaaaggtaaaataaaaaagcatgtgtaagagaggaacaatgtttttttttcccaaaaacctttaatgggagagaaaaaagcagagttgatatacctaatgtaaatgacgagttaatgggtgcagcacaccaacatggcacatgtatacatatgcaacaaacctgcacgttgtgcacatgcaccctagaactttaagtataataaaaaaaaatacgtatatataaaaaaaagaaaaaagcagagtcaccctataatcaattttactttggtgacattgaaacaaaatgggtactgattggatcttgagaccagagccttatgtaattatcaatcttgaaaaatcttaacatgcacacaaagatttttcttctgaaatttaaacaatagaaaagttaacaataaagacaactaaccagcaaccaaaccactgtatgtcctgtggttttcttactgtcttacataaaaacatcatttaactttttttttttgagacagagtttcgctcttgttgcccaagctggagtgcaatggcgtgatttccgctcactgcaacctccgccttccgggttcaagtgagtctcctgcctcagcctcccaagtagctgggattacaggtgcgtgctaccacacccgactaattttttgtatttttagtagaaatggggtttcaccatgttggccaggctggtctcgaactcctgacctcaagtgatcctcccgcctcggcctcccaaagtactggtattactggtgtgagccaccgcgcccagcccatccatttatcatttaaaatcctagctggtattgcttctcactcactttttgggaaagagatatttagctacacaagttattaaggacaagtggcaagactaccagaactttttgttatttccagttcctaaaaatatcatttatggaaacagtaatgtggccatgtaaaagtcatccaaagttatttgaagaggcaaatacagactgtacgaaccatagcaaaagaacatccaaatttccaacacaattcttttgaccatttggagaaaaaaagcctttcataaattactagtaattcccctataaaattgtgattctcattatgaatggtattttaatttcccctaataatagaatttttgagaccttcaatgtaaactccaaactctactcttaaaggattctgtgtatttgcaaaatgtctcaaatacagaaaaaaaagcttcttttcaactcaaagcaaagccagaaaacaaaaataaaatcttcaaattccttgaataatctccatttgagaaatattttaaagagaaggccagaagaacagaacataaaatcagttaatcacctgtttttttttttttccttttaactttataaaactgatgtttcttttcctcctttcccaaaattcagcctcggaatctctggattcaataatagtatatgctatattttaattatttatttttaaagtttctgtctcatctaactggaatgtaagctctgagcgcagagagcttacattttgctacctcccaaaatagtgtctggtgcttatgaggtggttactttgttgagtgaatggttcatgagctccgggaactagttgccttctctcagttatacaacattttttttttttttttgagttggagtctcgctctgtcgcccaggctggagtgcagtggcgcgatctcggctcactgcaagctctgcctcccgggttcacgccattctcctgcctcagcctcccgagtagctgggactacaggcgcctgccaccacgcccggctaatttttttgtatttttagtagagagggggtttcaccatgttagccaggatggtctcgatctcctgacctcgtgatccgcctacctcagcctcctacataaaatagagacagggtctggctatgttgcccaggctggtctcaaactcctgggctcaaagcaaccttccagcctcaaccttccaaagggccaggattctaggcagagccgccacacccagccagtcacacaacttgtaagtggtggagtcagaaactaaactcagaccatcttattctggttcttaaccatggatctgaccggcttctgttgacaggtatatctaattcataggtgtgtccgttaggaccgtacaccttaatagccttagtagcctaaccttaatagcataaattattaaccatgtgctgtggatctactacttgcaggaaggttgaggccatttccaggtttagtcacccatcttgcccttggcctggggaaatgatatttccctcaaataggaaaataaaggcattggaaacgcctgagtgggttgcaatgttagagtgttttgttttgttttgtttttgcctcaaaaagtgacatttattcaaagaaaaaaatgacaagatgtccatcccttggctcccttccctccccactcctgctgctcctcagccccccgagatagagccctggctggggctgggtggcaggacagcccctcagatgaggtcagcaacattgaggggcatttcctcaatggaggagttgtagaagatctcgatgtctcgaagagtcctcttgtcttcttctgtcaccacgttaatagccacacctttacggccaaaccgtccacctcgaccgattctatggatatggttttccctgttggtgggaaggtcatagttggtgactaaagaaacctgttgcacatcaatgcctctggccagcaggtcagtggtaatcaaaactgctagagccataacgaaactccctcaagatcacgtcttgttcgttttggtccatatctccacgaatggtgaagacagtgaaatctcgagcatgcatcttctcggtgagccagtccaccttcctccgggtgttgatgaagatgactgcctggggtgatggtcagggtttcatacaagtcacatagtgtgtccagcttccactcctctcgttccaaattgatgtagaattggcggataccctccaaggtcaacacttccttcgtgacaagaatccgaatgaggtccctcatgaacttcttggtcacctcaagcacatcagaaggcatcgcagctgacagcaaaactacctgggtgttgctgttgagcttttggaatatgtcatagatctggtccttgaatccacggcttaacatttcgtcagcttcgtccagtacaaacatcttgatgtatttgggagacaggtatctcccgttaagcatatcaaacacatggccaggggtacccacaatgatgtgaggagcttcgtctgcagtttctgcacctcagcacgcatgttggtgcccctgatacaggcatgacaggaggcacccatgtagtctcctagtgccatgaccaccttctgtatctgctgagccaattcttgagtgggtgctaggagcaaggcctgggtggcttttagatctaattcaatctgctgcagaatcaatatggcaaatgtggccattttcccagccccagattgggcttgagcaatcacgtgataayccttgatacaaggtagaatggctcgctgctggatggcagacggcttctctaaaccataggcgtagatgccacggagaagggactctgagaggttcatgtcatcaaagctgtcaacaatctcattccagttactctcaatgacacctttgggctccatcccattggggccgttgtctctggatcaggaatcctggctcgcagacatgatccttagaaactctagaatagttttttgttggcatttggttttggttttggtttcggtaagagcaaaaggaatcaaagtatcctagtctctaggatccagggaccagcctccccttgactggggaaggaagatgttgcccttcacagggaggaaggccgggacctgggaaggtcagaagctggatggggtacctatgatgtcatagcagctctctgaggttgagagtaagagcccttttaagaaagtagataaatcccagctactcgggaggctaaggtaggagaatcgcttgaacctgggaggtggaggttgtggtgagccgagatcgtgccattgcaccccagtctgggcaacaagtgcgaaactctgtctaaaaaaaaaaaaagtagataaaagagaacaagctaaagtcagaattcaactggccacttggaactgtccttatacaccctagtcctcatttgactgtttctcttctgtttatgtgccttttaaaaaccttttttatagcatccttcaataactcaactggtacagcagaggactatagtcaaaacctttttattctgaaataatttcaaacttatagaaaagttgcattcttgtcattattcttagttacagagacctcctatatattctttacccagatttatccatttctcacattttgacaaatttgctttgtcattctctctctaaatgcattatactcatttttttctgaatcatgtgagagtcagtgcatatattatgaccctttatctcttaatactataatgcatatttctcaacaacaagaatattctcttaaataatcatggtacatgtttagacaggtgtggtggtgcatgcctgtaatcccagctacttgggaggctgaggcaggagaatcacttgaaccctggaagcggaggttgcagtgagctgagatcatgccactgcactccagcctgggcgacagagtgagactccgtctcaaaaaaaaaaaaaaaaaaaaatcatggtacaggctaggcaaggtggctcacacttgcaaccccaacgctttgagaggctgacgtgggtcaaggtatcccttgactccaggagttcaaaataagcctggacaacacagcaagatcctgtttctataaaaaaaataataaataagttagcccagcatggtggcatgctcctatagtcccagctgctctggaggctgaggtgggaggattgcttgaacgtaggagtttgaagctgcagtgagctatgattgagccactgcactccatcctgggcaacagagcaagaccctgtctctataattaacaaaatgtatatcatggtacaatgatcaaatacaggaaatttaacattggcactataaaattcatattccaccattgtcaactgtcccaataacacccttgatagcactcctccctccagtacaaggcccagttcaggagcatggattgcattttgttgtcatgctctttgtctcctttgatctaaaatagttcctcagcctttctttgtcattaatgacactggcattaaaaagaaatacaggccagctattttatagaatgttcatcaatttgtgttttcctggtgttttc

SEQ ID NO: 96146 - DNA, 33019 bp, Homo sapiens
  misc_feature (1)...(33019): n = A,T,C or G
gggaggacccaggttgggggggccctctccagtcccacccagtttagggaatgcccctgccctctcccccaccccccttcacctggctcttaaagggcccggcccctggccggcggctacttaagacagaggggcggcggcgggcagcagctgcgctgcgactgctctggaaggagaggacggggcacaaaccctgaccatgaccccccacaggctgctgccaccgctgctgctgctgctagctctgctgctcgctgccagcccaggaggcgccttggcgcggtgcccaggctgcgggcaaggggtgcaggcgggttgtccagggggctgcgtggaggaggaggatggggggtcgccagccgagggctgcgcggaagctgagggctgtctcaggagggaggggcaggagtgcggggtctacacccctaactgcgccccaggactgcagtgccatccgcccaaggacgacgaggcgcctttgcgggcgctgctgctcggccgaggccgctgccttccggcccgcgcgcctgctggtgagtccgcgccccgcccctgccccgcccacgtgagacccgcgtcctccaggcagggtcctggggagacgggagtgggtggcccggcaagcctttccgccctggcccttgacgcttccgactttggggggcacatttgtgtgggggagaaggggcaagtgcaggaagctgaggtgcagccaggggacctggtgatacagcagaaggtgtctgcgctctcggccttcttttttgctccatttattttcccttgatggagtgtgcgtgcaggtgggaacttgggggaggcagggggagaaatgggagggttttagggccatcccatgggctccagcaggcccagctcctacaaccctagacggccaagctggggaaaggacccaaatgttgttctcagcttccacttggagaaaaggggaggggaaccccagactctgaaattctgcacacactgagaaatgactcctttcctcctaataccggtgttcgaagcacctaaacaggaggcgtctagaaccgaagaggccccaaatccagggttgtattagacttgagtagggactgagggcaggctagggcgtaggttaggggagaggggagaaagagtaggggaaagagggaatctgccaaatcagggttatgatttaaacctgctcagaatcgytcacccatcctaccccaccctgctccagggaggagagcagaagctgagtcacygggtgggtgggacagaagtgaatcagccgtgaaaacatggggggcagcggggagatggggagggcaggaaatgcaaactgcgcatcccagaggctctgggttccttccacgggaggggatggagaattcacttggagtttctttcagttccaaatgcccgagtgcaggcttctgggcgtcctcctaaaaggtggtctgggtggatgagaggaggcagtttggaactaaatggttgggtgctaaatgtagggaatgaaggagaaggtctggggaggggtgggcatcctgaggaagaaggatcagactcaggattgcaggggaaatgtctcctgggttgtgagtggtagttagctgggagcttgtctttaggcacagaggaagaggatcccttcaggggttctgatatctgattagatgttaggcaaattccaagcagtcagtacatgctcccctttctgccttttcctgtccctgacttatttcctcaccccttcccagtcctgagctctccccggaccctccggaaactttctccagagccaggagcaacctgcaggttggaagcccctcattccttgcaccttcttaatctgccctcagcctatcttggttaagggttgaatccatgtgctcctgggaccactggggttgagctggcctgggtcacagggtaccagaagggagaggttcccactgcagtgccccagaagtaaccacatctcaggcctgggaggggtgggttgagtcatagcaaggtcacagcagggacacacattccttttgggtccctgttggcccccctcctacatccgttgctcttctgccccagctctcyggcttcgtgcgcccccttctggcctctggtggaacagccaggtcttttcacccaaagcccaaagccccaaatagtcctttgaatttgttctccattttttcatttattttattatttattgtaattaattgattgatttttaaattagttaattttttaaaattaagtaattagttaattttttaaaattaagtaattaattaattttttaaaattaagtagttaattttttttaattaagtaattaattaattttaaaaagtatttatttattttgagacaaagtctcactctgttgcccaggctggagtacagtggtccagcgtctcactgcaacctccgcccccccgagttcaagcgattctcctgtctcagcctccggagtagctgggactacaggagcctgataccatgccaggctaatttttgtatttttagtggagacggggtttcaccatgttggccaggctggtctcgaacgcctgacctcaagtgatctgcccaccttggcctcccaaagtgctgggatgacaggcatgagccactgcgcccagccaataatttatttatttttgagacagggtctcactcggttgtccaggctgaagtgcagtagcacaatcatggctcactgcagtcttgacttctggggctcaagcagtcctcctgcctcagcctctcaagtagctgggactgcaggtgcacgccaccacacctcggtaattttataaattatttgtagagatgaggttctcattatgttgcccaggctggtctcaaactcctgggctcgagcaatcctcccacctctgcttctcaaagttctgggattacaggcgtgagccattgcacccatcctcattttccatttttgctttccaaaattcatctcctttataagccttaaaaatcagtatgggaaatactggggaatattgtcaggaaaagtaatataactatttgtcagagaaagaaactagggccagcatcatgcaacagcggggcataaggccctcccttccttacttcagcaggtgatgtgggcaaggcccttctccacatggctctgcctgatttctgacctctccttctcctattcctcctccagttgcagaggagaatcctaaggagagtaaaccccaagcaggcactgcccgcccacaggatgtgaaccgcagagaccaacagaggaatccaggcacctctaccacgccctcccagcccaattctgcgggtgtccaagacactgagatggtgcgtttggagctggtagggagcaggaggggtgggaagccctggagacttccatctgagactgctcccttgggcttggagacgtctccattgtctgtcctgggtgcttgcctggtgggccagaaggttggaatggggagctgggctggagcggttctaagctgcctactctcccttccccagggcccatgccgtagacatctggactcagtgctgcagcaactccagactgaggtctaccgaggggctcaaacactctacgtgcccaattgtgaccatcgaggcttctaccggaagcggcaggtgagactatttttcttctcctcctgctccagcagaaggctcctgccagggagtgggggcggtgctgcttacaaagctgcataaataagacactgccccatctttaaggatcttccaactttaggagaacatagagaatataatttattaaacaaacttagagaataatcaaccacacactgtgagagaaaacccacttaaggaatgccctaactcagtggctcttgaacttgaggcatcagaatcctccggagggcttatgccacacagatagctgagccccaccggcagccttcctgattcaggaggtgtggggtggggcctgacaatatgcatttctaacatgttccctcgtgatccggatttgggaacgtcactttgaaaactactgttccaggctagcagaatgcacacaatttattggttgaagagggggaactaaagagagggaacactgggccgggtgcggtgtctcatgcctgtaatcccagcactttgggaggccaaggctggtggatcacgaggtcaggagttcaagatcagcctgaacaacctggtgaaaccccatctgttttaaaaattacaaaaattagccagatgtggtggcatgcacctgtaatcccagctactcaggaggctgaggcaagagaattgcttgaacctgggaggtggaggttgcagtgagcagagatcatgccaatgcattccagccagggcgacagagcgagactccatctcaaaaaaaaaaaaaaaaaaaaaaaaaagagagggaacccccgaggagacgctcaggtgtttttacatcctcagactcagatgtcccctctcattctcctgctggaagcctctggcctcactcctgacctgtgtgcctctctctccagtgccgctcctcccaggggcagcgccgaggtccctgctggtgtgtggatcrgatgggcaagtccctgccagggtctccagatggcaatggaagctcctcctgccccmctgggagtagcggctaaagctgggggatagaggggctgcagggccmctggaaggaacatggagctgtcatcactcaacaaaaaaccgaggccctcaatccaccttcaggccccgccccatgggcccctcaccgctggttggaaagagtgttggtgttggctggggtgtcaataaagctgtgcttggggtcgctggcttgtgtctctgtgtctgcctctcacaattctggaatccctggccctctctttaccccactacagctcactcacagcatttctcctttcctgtggatacctttagtccttcctgtgacagccaggcagaagcttcaagccatcaagcctcacagagctgcccaccaggagttgggagtgggaaggggagacactgagatcatggccttaatctgaagttgtgaccttgtttctaacactgatctttggacacaaagggaggggaaggattaatagttaatcccagcaggaacccagcaaagaggaactctcaaagcacatacccttctgttacttcctactaaaaaaagaaggaaattattactaatatatgagctcatcccatggccctgaaccatgtgattttacctggacaacctcattttgagcttacgataaccttgtgatatagggatttttacccctatttttcagaggaggaaactggcttaaaatttggggtcacttgcctgaaattatatagctggtaaatgacagagggaggtttgcatccggttcttccatatgtgacaatacctggtattccctaggtgctgaatacgtgtttgtttagtctcctttctgcctacatgctcacccaagcaggtgtcaggaagcggccctgtcagttcaggggccctgacactcagcctttcctggaggggccccagttccgtgagtagcacagtgccaaccccatcagaatattaccacatgtgtcaatcacacaccttgtggtgaaagcgagctgaacgcactgatacatgaagacatttctgactcctccctgaccttcagcctgctgggagagagacyggaaggccagccatgctaggtgacaagcttctgagaggcaaagttcccctccccaagatgtacccagccactattcctgtgtgtgtgtggcggggtggatagcacccttggagctgggcatctggatggtggttggggtgttagggggatgtggcgatccctgcgacagacagcagagtgaggtctgaatctgagaagctctgcctccagatcagataacctatcgcactcccagaggccccctcctcctgaaaggactttagtctttggagctgtcacctgagctgagtgggacaagagctctacagggcaggccacactgcgaaggaaggaggcaacacgggcaagggctgcctgctgcccgctggagaccgcaccatggagccaggcggggcccgtctgcgtctgcagaggacagragggctgggaggggagcgggagcgccaaccctgtggagatggtgagccgccctcgggggtgcagaaggcacaggcaagtgggggggaggcggggagagatgcgctatggagagaaggctccaactgcctgatgccaatccttcctgctgtccagagaggccaaggaaggtagaccctggcctcagcccagagccacccagctggaagatggaacagaaaagagctatgtcagagctgtggcctggccttatccttctgactgtttagccccagatagtgaatggagtagcttcccrttccctgagtgccctgttcccagtaatgtcaccaggccccctgcttgcctatggcctcctcaccactggcaacagcaacttccccttctagtagccccaaccrtgatactagatattggctggttggggtgagggcagctgctgagcacacaaagcatttcctgaccacaggatgcctctgggtctgcagaaccccaattcctcctgttgactgtgcctttgatccctsctcacaggaaacactgagacgcacagagccccggacttggtacaatggacccgacacatggaggtgagkgatgtcagaggtcagaggtcaagtggacagatccttggtagcaggaagcaggagtgaggcttggtgataaagatgacttttttttttttttttttttgaaacaaagtctcgctctgttgctcaggctggagtgcattggcacaatctcggctcactgcaacctctgcctcccaggttcaagcragtagctgaactacagatgagtgccaccaggtgtggctaattttttttttatatttttagtagagacggggtttcaccatattggccaggctggtcttgaactcctgacctcaagtgatctacccgcctcggcmtcccaaagtgctgggattacaggtgtgagccacggtgcccagcctgatgacttgttcctgagtgcaaagatcggattcgaattaaggatggagatggaggggtttgaagcacaggtcccaaaggtcaccaaaagtcagccagtagatagagtcttcctgctagtgcggctggaggccaggggtgaggagtgacaatcggaggtgaccaggctggaattcagacccagggaggggaagccttgctcctgctgtcactccctgatcctcgctgctgccccaggaagccagaaggagatcaactctgggcagggatcatggcttgttcatctttttaccacagcacttagcactgcggggtcctaccccaccagcagacccatcaccaccccaccaatgcctgcccttccccccrcaggcctgccaccactgaacccccatccctgctgaccccccaggttgtttttttttttwaaaaaagcactgtgcctggcatagacagaaattcagtgaatgtctggtgaatgaaaggatggctgactggagggacagtgggctctrccctggctttgtcccgtaggctgtgaaggcacaattgctggagcaagcgcagggacaactgagggagctgctggatcgggccatgcgggaggctatacaatcctacccatcacaagacaaacctctgcccccacctcccccaggttccttgagcaggtgagtctggggaatggctgcgcgggctcctctgtagcaaggatcatgagctagaaacatcacgttatgtgcccttgccagctttatcaggaccgtgactccagccttccctcttccccccttgtcttcctaacactgacctccatctactgggcctcgctctgccctggccctgaccttctacccggtcctgccctctggccctagccctgacctttccctaccactccccttggctcccaagtattgaccttctgcatggccctgccctctgcccatttactttttcctgaccctgaacaaacatctcaattcaggacccaggagccatccctggggaaacagaaagttttcatcatccgcaagtccctgcttgagtaagtcggggtgrtgacaagtaatgggaggaaaagaaagggmtttggctaggggtcaaggtacctcatttctcatccccagsctctaggtggtttgtggrgaggacttggaaagggtttctaaggtgcrggtcccctatttgccctaggcatggttgtggaagaaaggmctttagctggaagttctggatcgctaggcyccatgcctcatgtgtacagtgtctgagctagttcacacaaccctgaggaccctcccacactgactttcgggcccctgtccctctagtgagctgatggaggtgcagcatttccgcaccatctaccacatgttcatcgctggcctgtgtgtcttcatcatcagcaccctggccatcgacttcattgatgagggcaggtaggtccccttcccacctgggacaggcacacctatctgatcagaccctctgggtcctcagtgccccacctgcccttggggcaagaggacacaggttccccctttggttattggacatgtaccaacattgctcccaacaacctttccacctgaaacactctctaggatcccttccttccccagccttggttggccctttgtctgtcctcccagggccggccactctcaaatgcttctcaatgacaccttgccctgaggcagatgtgtgtgtgtgtgcacacatgcacacccatacacactcctttccaagtcagttctattcaagtaacctccattgagcacctcccgagtaccagtcctagtggccagagaaatgaggggggcagaccccactcctgtctgtgaggcactcccagtcttgtggggaagacagacatgtaaccaagtgcctgggtgggtcatttccccsacagagcaccccatccaactgtgaggatgagcctcagagagctgtatacccctgggggtctgtattttcatacctcccmctattcccagaccaaactgagggttggggctgctatttctcatggcccaataacgagatgcagatgaactggggaggaagtgagtttttatttctgtaaccagttacagggagaaggcctggaaattatcaccaggccaactaaaaattacaatttccagagcatatataccttctaagctctacatctatgtgtaggtgtgcattcatctaaagacataagtgattaacttcttttaatctataactaaggtctgagtcttgaagaccttcttctggagcctcagtaagtttacttaatctaaatgggtccargtgctggggtgattacccttctcttatctcctgctaaataacggaggtttggggagtttcttcagacccccagcaaaacttgtttaatcatgctttgaggttcaggaaaggcctaggcaaaactcttggtgggcttttgttacattccagcctttgtataagggcactggtttttaacatttaacttaaccactcagtcagtactgaaacagttgttatggaggtctgcattagtgagacctgcttgtcacagtccccactgtcaatttacacgatttttatcatgyrtggatatttatttatcatgagaatcgcagggagatggggagtcgtaatctttctggctacttcctgctgagagggggtcgtcgttatggggcaccaaaagcagcagtggagtggaagaggttgatttgttcgcagtagcactctctgtttcggggccttggaggcagcacctgctgaaacataatagtatgtaacagtacatataaataggctactgctcttttcttctgaagtttaagttgtctagtcttcagtttgcagggctttaagaaagcagagcttaggtttcagtgattaccaattaggaagaatgggggaaaatggaaaagaaagaggaaaaaattgaaaacattattttggagacctgtagccagaaaagttagaatttaatccaaactgcagaaaataataaaaactgaaaaacatcaggcaagactagaatttaacaacagatgtacttttttttttttttttttgagacagagtctyggtccgttgcccaggctggagtgcagtggcgtgatcttggctcactgcaacctccgcctcctgggttcaagcgaatctccaacctcagcctcctgagtagctgggactacaggcacgtgttactgtgttcggctcatttttgtatttttagtagagactgggtttcaccgtgttggccaggctggtctcgaactcctgacctcaggcgatctgcccaccttggcctcccaaagtgctgggattacaggtgtgagccactgagcccagccatagtttttgaaacataatttttctctctccagtttcccatttttattaaaagacagatcatagtaggactggtttgctttattatacttggtttaattatttgtatacagtacagcaagaataattagtttcacataggccttttaaattggctttgatggaacttcgttccatagaaggaatctgagataagtccttttaaagccgagcccagccatggatttgtaccaataaatacctatgagttgggtgaattcctcttctcttgaggttccaagataacttggggttcctggcctgtcagaaaatgacattctttacctaccacagatcagaaaccctggacagggactgtgtacacaaaatatgatgccagttttcaagggctttattggcttcataagtcaagttcgattccttaaaaaagagtacaccattccagtcaaagccttgggaaaataaccactttttccaattatgtcctgttacaaaagaaaacagattcttattgtactatgcaaataactaatattgcaaatagtttccaaattctggagaaatcaggtagagagaaacaaacatgctccaaattttattcataggagtatactttacttaattgttaaaagctattaatagctcaaaagaaaagtttccttgactctgcaaagcaaaacaaaggactagcaacattttaagcaaaaagtgaaaaagatcacttcaatctcctwttagttcagtacatgcagttaattcctgtcctgcttcatattaatgaatattttaactcttcaagagccctaaatgtttttcctccattgtgatgtcacaatctacaaagttatcagaaacctgcattcaagagcacctgttagagctttataactgattataaaaccaccttctaaagaggaccaaaacaagaaaacaattgtttatggatgacaaacagttttagggtagccatagttaaagacacaattgacaaggaaatctgttacctctgtagcacacaacaatttaacataacaatggctgggcacagtggctcatgcctgtaatcccagcactttgggaggccgaggtgggtggatcacgaggtccggagttcaaaaccaacctggccaatatggtgaaacccygtctctactaaaaatacaaaaattagctgagcatggtggtgcatgcctgtagtcctagctacttgagagactcaggcagaagaatcacttgaacctgggaggcagaggttgcagtaagccaagaycacgccactgcactccagcctgggcgacagagcgagactccatctaaataaataaataaataacaattctaattattattgataatgtacactaagatatatcagaattatagcagtctctcataactttggaatacataccaataacatatttatacaaatatagcccaaagaaagtcaaaccccattttatatttggcaatgcttcctgtatgatttttggtaccaaataagccaaatttcacctttwtattagtgtactattaatgttaaacccaattatttatttatttatttattttcttttttgagacagagtctcactccgtcacccaggctggagtacagtggcatgatctcggctcactgcaatctctgaatcctggattcaagtgattctcctgcctcagcctcccaagtaattggaattacaggcatacgccaccacacccagctaatttttttgtgtgtattcttagtagagatgggatttcatcatgttggccaggctggtcttgaactcctgacctcaagcgatccacccaccttgacattcccaaagtgctgggatcataggtgtgagccactgcacctggccttaaacctaagtcttaataaaaccttatacacatggtttacccaattttaatgtttgaccataaggtaagatttgtatagactttttcgaaccctttacaatttttgttaaagagcaggttagtgctctaagagaaacccattgtgcttttattttaatgctcaatttacagaagaaactggatgatacccctttaactttagccaatatgtttacacacagaatttcctttacaatcaaccttccacaacttgcttaaacctccatctttatcttacccaacttaaaacaatccttttaccttttaatctagggaaaaatccattattgtcatgccttcttataatctttttaccaaaagtatattttacttttcttatacaccttgcacataaattgtttcttcaacagtgttaaatatatattatactgttaactcttagcaacctttacttttggtgaaaaccttggtaagtttgggattttaattatgtactaggtgtggcgcctaggacctagacaggagtacagataaggtctgacttattccagcgtctaactccatgtgtcctaggacttacctagctgtaaagcaggcaagttgtacagctaagagtcataaagcatttaggaggcctaatcacctttaaattgtataacatttcttgtataaatttcctttaayaaattctttcaggacttccacagacaatctctgacatcccttgactttctgatttgtcctaaacatgtttctctttaaacaaccagttattttactttaggacaagaatttaccayacaagatcctttcttatataaattctcttttctttaatatctttttgcatatctagggggcatggctaatttcacatgtccctagccttatctagaatctaacgctccaaaataaatttaacaatttttaagtcaaagatgcagtttatgacctaaagcatttagcaaacctaatatttgacatccataatttaaaccaaacgtttacatttttgaagatatttttattttaccaataatctttaaaattgtctttatttttataactttttttatgcctctcttatttcctgttttttttaccttgttttatatataacctttaaggtttgaattagacaaaaattagttactctttaaaaaggacacaatttttagaaagaatgttttcctacatttttattggaaaatacccaaataatgaaatatctgttgtttaactttagattctaaattatgacaagtttatgagtatttatcccattacatttatctaattatttattttaatcatttgcctacatttttttttttgagatggagtctcactctgtcacccaggctggagtgcagtggcgtgatctcggctcactgcaagctccgcctcccaggttcacgccattctcctgcctcagcctcctgagtagctgggactacaggcgcccgccaccacgcccggctaatttttttggtatttttagtagagacggggtttcaccgtgttaaccaggatggtctcratctcctgacctcrtgatctgcctgcctcggcctcccaaagtgctgggattacaggtgtragccaccttgcccaacctatagtgtagctttaaaacagagaatgataacagtcctttcccagaacaaacttccttcatgtctgtggactagactaaggccacaagagtagaagttagggtattttactaaataattcaagatgtcgctatcttcattaaacaatattaatgtttcattcattaaaaatgacatgagcaaagatcattctgttttgggctgagttatagttttgtagcctctatgccaaattttgacaccttatrgtatttggcagagataagtatgaaattgcttgatcaataaatgcaaacaaaaatgtatgctggcaactcttamgacatttctagtattactttaccaataatttttaaagctagcttatgtattaaagattttatttaagtcacataaacttgaaaaagcatttgactagtctttccttttttctgttaaagtatttaagtgcttttatttttctttaagccaattaattagaactcttttatatattttcagtagtgaaacatggtatacacaagacataaatacgcagacgtattaggcatgccaatagaagtacattttatagattcctaagacctcctttttcctctcttttaactggatctttgtgctctgggcagatcttacactgaatcctgggttttcaaaaagggagaattattatgaagccagatcatgtgaggcttttacagtgcacttacatttttttttcccaaagacatttctatgtctctcaattacacttcttaaaaaccccagagtagcttctgttgtaatagctattaatcaagaaaacagaattcagtcaactgagaaggaaaaaaacttctgctcaaaaagacaaggtcctggccgggtgtggtggctcacgcctgtaatcccagcactttaggaggctgaggcgggcagatcacctgaggttgggagtttgagaccagcctgaccaatatggagaaatcctgtctctactaaaaataaaaaattagccaggcgtggtagcacatacctgtaatcctagctactcgggaggctgaagcaggagaattgcttgaacccgggaggcggaggttgtggtgagccaagattgcaccattgcactccagcctgggtgacagagcaaaactctgtctcaaaaaaaaaaaaaaaaagacaaggtcctaggagagaaataaaaacaaaaccaaaaacatgaaagccttttaaatacaaacgtgcacacatgcacacatacgtatacacatcttggatgttatcttttaattaagctgactctcaaccattgagcgtctagaagatatttttccttcccagtggcctctcagcaggaatggacccaatacctcccattttcttttttttctttcctttttttttttttttttttaagacagagtcttgctctgtcgcccaggctggagtgcagtggtgcaatctcagctcactgcaacctctgcctcctgggttcaagcaattctctgcctcagcctcccaagtagctgggattacagacgtccgccaccacacctggctaatttttttagtagagatggggtttcaccatcttggccaggctggtctcaaactcctgaactcatgatccagccaccttggcctcccaaagtgctgggattacaggcgtgagccactgcacccagccaatacctcctattttcaagtttacatgctatcaaagggaataagacagatacacaaataagtggagacaaattttggacaacacaagggggagtgcactcaggcaaaacagactcaaaaccaactcaaaacctgattgcaaccaaaatgcaaagcaggcgtatgagtgagccctattgcttccctgggtggtaccggacaaatggcttaacaagcccaataggaaaacaataggctcccggcatatgatctgtttaactcaccctttgagcgtgtctgcttctgatctctgttcttccccagtagtgaaagggacgtgcagttttgcacacgggacagccctcgggagggtccccargaaaaatctcacgggcagctgcttggaccctcctgaagactgtctcatcgcaagccactggtggctgaacacagcaccatcccggtctctcctggctggcttgccacgttttgttcccaggtcaaactgaaggttgggctgctatttcttgmggcccagtaacgagatgcagatgaactggggaggaagagagtttttatttctgtaaccagttacagggagaaggcctggaaattatcaccaggccaaytaaaaattataaagttttccagagcttatataccttctaagctctatgtctatgtgtaggtgtgcattcatctaaagacataagtgattaacttcttttaatctataactaaggyctragtcttgaagaccttcttcyggagcctcagtaagtttacttaatctaaatgggtccaggtgctggggtgattacccttctcttatctcctgctaaatcacagaggtttggggagttccttcagaatcccaataaactcatttgtggaggcctggggagtttcttcagacccccaataaaacttgtttaatcatgctttgaggttcaggaaaggcctaggcaaaactcttggtgggcttttgttacattctggcctttgtataagggcactggcttttaatatttaacttaaccactctatcagtactgaaacagttgttatggaggcctgtattagtgaaacctggcctgccacatcccctctccctatgttgggcttgggaagcaatgaaaaaaacagctccaaggawccacaggctcagcaacagcactgccttttggtaaaatttttgttgttagttatacaagtattaaaaggacaaaatctactgctaggtttgcataagaaaaaaataaattaaaaaaactaaaaatgataaaatctcagtaaaaagctcaaatacatgtttttgtgtaaaggaggtccttcttgaccgcctccttcaatcccacactgctctcggaggattttaaacagtttctggctgggtgcagtggctcacgcctgtaatcccagcactttgggaggccgaggcaggmggatcacttgaggtcagcaattcaagaccagtctggccaatatggtgaaaccctgtctctactgaaaaaaaaaaaattagccagtcgtggtggtgcaagcctgtagtcccagctattcaggaggctgaagcaggataattgtttgaacccgggaggcggaggttgcagtgagcagaaattgtgccactgcactccagcctgggtgacagagcgagactctgtctctaaaaaaaacagtttctgagtttccacccagagcattttccatgcattgacattcagtaccaaagataggtacattgtggaggtttcacgtaaacaagaaactgtacctattattttgtaatttgattttactccctaacaatttattttagggatcttttcatgttagtccattggyttgaaggactgaagaatatggaggtgccagatttgttcacttagtcctttactaatggacacttaggttgttttcagtttttccccttaacaaaccatacactattaacctaggctaacaaaacactgaacaaccggcatcctattacctccaatctacaacaacagacgctccaaaggaataaaactaaggaaagtcagtctagttacctcatatcctaacatgtgttgtatatagagtactgagcccttaccaacaccatgaaatcagagagggctctcaaggycatttagaatcaaactcatgccatgactgagtctcctggagcaacgccctgtgccacagaggtgccgtcttgaacacctccagagatggggagctcacaacctgatcaagatacctcagttcatcttccaggagctcagactgaagaggaaggggacaagaatgggcttcacttgtctactttgtctctccttccccactccaaggctgctgctggagtttgacctactgatcttcagcttcggacagctgccattggcgctggtgacctgggtgcccatgtttctgtccaccctgttggcgccgtaccaggccctacggctgtgggccaggggcacctggacgcaggcgacgggcctgggctgtgcgctkytagccgcccacgccgtggtgctctgcgcgctgccggtccacgtggccgtggagcatcagctcccgccggcctcccgttgtgtcctggtcttcgagcaggtgagggccgagccctgctgacggacaggaaggaaccagctggtggggccatctcagcagagggggagtcccccaaagagggggcggggcccacgagagggaggcgctggagaaggcattggcaggggcggagctagttaccgggggtggagtccattacgagggatttggggaacctgcaggctggaaggcaaacactgtgacaccgccatcacaggaggttgaccggaagactccgctctggcctcttatccyagcagccttcattcatcccagcatatgttagrctatacggccatccaacaaaaagaaaaagtatgggctctgaccagacagatcttacactctgcctgcctctcagaggtaacccararcacaragaggktaagcgatttgcttaaagccacacagcaacttttcctccccttccattctgccacaggttaggttcctgatgaaaagctactccttcctgagagaggctgtgcctgggayccttcgtgccagacgaggtgaggccttcatcttgcccggttgtgaactcagtcctcttggctgactgaatgaagccagcaggtgcaggatcctgataaaagtccctgccttcctaagcccgggttgcccaccaggcacagccctggcatccagctgggctctgtgggccttcatcattaggcattctcagcccctgcctctgacagatggcacctctgttacccaggacttctggcactttcctatttcctatttccaggcccagcctgtcacccaggctttgttattccatttatagagcacaggcagagtatatttagcatcattcttaagggccctaaaatttttggaatgacaagttggcactggctccaacttaaagtcaccagctgcattagcccttaacaagagcccttaaagtcaccagctgcaggctgagcacagtggctcacacaggtaatcccagcactctgggacactgagacaggaggatcgttygagcccaggagttcaagaccagcctgagcaacgtagtgagatggggtctcacttcaaaaaactttttaaaattagccaggtgtggtggctaatgcctgtggtcccagctgtgtggaaggctgaggtgagaagattacttgagtccgggaggkgaaggctgcagtgagccatgactatgtcactgtactccagcctgggcaacagactgagatcccatctcaaaaaaaaaaagtgagagacatgcaactctttctttcaytcacttgaacacttaaagaccatttcaacgttattaattggcccaatttcaaatttttttttttttttttgagatggagtcttgccctgtttcccaggctggagtgcagtggcacgatcttggctcactgcagcctccaccttctgggttcaagcgattctcctgcctcagcctcctgagtagctgggattataggtgtgtgtcaccacacccagctaacttttttgtacttttagtagagacagggtttcaccatgttggccagggtggtctcgaactcctgacctccagtgatccacccacctcagcctcccaaagtgctgggattacaggcatgagccaccgcgcccggccaatttttttttttttttttttttttttagagacagggtcttgctatgttgcccaggctggtcttgaactcctgggcttaagcaatcctcctgccttggcctcccaaagtgttgggattacaggagtgagccattgaggctggcccctaatttcaatatcgttgtatctsagcgaataggaaagctcgaggagaacagaagagatgggagaatggccggtcagyagagtagtcagaacacacacagaatttgtcagttaagtttgctctcttatttgggtgtatttcatgatgccctaaaacaattacaattgtaacattaaaaatcactggtcacagtgatttttgccgaggtgagaagttggggtagaagggtggacctgtgactcatggtggtggagaggggacgtttctgggaggcctggggaggcagtgggagggtggtgccaagggaagaggaggccagtgctgggccagaggtccaatgccaccggcagctgccagtgtccctctccagttatgtatccccacaccccctccaggccctgggctgtgtgctctatgcctgtgcaccataccacatataataataagaagaaagaaatatttcaggaattgccaaaatgtgacacagtggcatgaagtgagcacttgccgttggaaaaagtggcactgatagccttgtctcttgcagggttgccacaaactttcaatttgtaaaagaggcaatatctgggaagtgcagtaaaataagatgtgcctgtattaggaagtccagacagaaggggaaggagaatgggttgtcgaacgtgtgggtaccaaatgaagctctggccacagcaggccctgcactggaagatagggtgcctgaaatgacagcagaagagayggtgttaaagagccagttccgctcctgcccagcttagctcccctagcccgcatccaggtcctacgtccagctccttgcttatcccccacccccaccctatccatttctccactcaccaatcccaccacccttccccagcagscccctcacctctgccctctgcccttncccttactaatccacccctctcattcctccccaggtgaggggatccaggcccccagtttctccagctacctctacttcctcttctgcccaacactcatctacagggagacttaccctaggtaagaccctgcactccttccccaaatgcccaggcccatcaggaaacttacccttctactctcccctccctgaggtcctcaggctcacctcaggcactggccactttctcaggaagcatctcataataaagatgggaaataggtgactggtagactaccctgtctccttgcccggcctatgatgacactagggcaacccactttcctggtttacccaggactgtcntgataatcctacccatcctacacacccttgttgacatccatgcttaaaacccacttgttatctctgttatggaaagttcagagtatcctagacyccaccaccctagataatcctcccaggcctaagcaattaagggaactgaggagagagggccccagaacccgtgcccaggctgaacagagaacaacatgaaagaatgagaaacatattgtccccattgccgctgcaggacgccctatgtcaggtggaattatgtggccaagaactttgcccaggtgagaagatagggtagaagggtggacctgtgactcwtggtggtggagagnggacatttctgggaggcctggggaggcagtgggagggtgatgccaagggaagagaaggccagtgctgggccagaggtcaatgccaccggcagctgccagcatccctctccagttatgtgtccccatgccccctccaggccctgggatgtgtgctctatgcctgcttcatcctgggccgcctctgtgttcctgtctttgccaacatgagccgagagcccttcagcacccgtgccctggtgctctctatcctgcatgccacgttgccaggtgagccaactaaggtagggctagagcagctgtgccctggggaaggctaatcagggaaggccttgctagttaccttccctcagtttcaacacgttctccttctgagtctcncctcacatctgtccccycctatcagggccattgccatggtctcagttcagaccatctgctccccctccacatcagcctcctaacccatctccctggcacccrgatctttcctttcccatctacccctaacactgctgcccaggtgaactttcctactgcaactaatcattccctaccctccttcaaaaactctagtgataagtcaatgctggcacttttggatcagatatgaacccttgatgtggcatccaaggctccttcccacacagccccagcctatctgskgraagatatgtgcytccatgcctccaggcctttgcccatactggcccctcagcttgaaataccctttcctaattttcagccatggaatctagttgcttcttggaggcccatggttgagatgccccctcctgtgggaagccttccttttgtagccatcaattactatgacccacctgtttctctgtactcacaggcacatcaatgccaccatacttagctcccattacatttgccctggacacatggttggacatctttctgtctctgtctctgtgtgtgtctcacttcaattactctgtgaactcccaatggccctttgagaytcatctctatcaccaacatctggcacaaagtgatgccaagtaaatgtacatgaacaaatggatgaataaatgaatgcatgaggccaggcacagtggctcacacctgtaatcmcaacactttgggaggccaaaggaggaggaccgcttgaggccaggagttygagactagactggacaatatagtgagatctcatctctacaaaaaacttaaaaatagccaggcatggtggctcacacctgtaatcccagcactttgggaggctaaggtgggtggatcacgaggtcaggagatcaagaccatcctggctaacacggtgaaaccccatctctacyaaaaatacaaaaaattagccgggcgtggtggcgggcgtctgtagtcccagctactcgggaggctgaggcaggagaatggcatgaacccaggaggcggagcttgcagtgagctgagatcgtgccactgcactccagactgggagagagagactccgtctcaaaaaaataataataataaaaaaaattagctgggagtggtggctcatgtctgtagttccagttacttgggaggctgaggtgggaggatcrcttgagtccaggagtttgaggctgcagcgagctatgatcacaccactgcagtccagcctgtctcaaaaaaaaaaaaaaaaaggaatgcataaatttgtgaattaccaataaatgaatggtaagagttggggccctggtttctgggcaggggctcctcagaacccagatcagggctgcctgtgggtccatgtgggccagcctgacctgcagcctcttgtccccaaccaccaggcatcttcatgctgctgctcatcttctttgccttcctccattgctrgctcaacgcctttgccgagatgctacgatttggagacaggatgttctaccgggtggggcctggacctaggccagttggaagctggagatagggagggttagggagggatctggggaagatggtagccaggttgggtgtcacttcagccatgctgttcacctcccataataagaaatgcagtcctctggatgtgcttataatgccacccctccacctcctgacaagccagggctaactgcttttgtgtgcatggtactacagaatcttctcctgagagagggagtaggagggaggacagggcctccgtgacctgaggagggaggtgggagagtgtctgctgtccctgttctgccaggagccagcccttctggaacactgggatagggtgcaggcagagggagcagtggggaggagccrgaacccagatgcttgcttacctcctttcccccactctgaccccaccttctccaggactggtggaactcaacgtccttctccaactactaccgcacttggaacgtggtggtccatgactggctstacagctacgtgtatcaggatgggctgcgggtatgggccctgcagaccccttcagctctcacagttaataggggctctccttccttccctctccttccctcctgctacagtgtggcaactacaccactcacctaagggcctaagggccgttttgatttcatctgtcctcaytttctcattttacccaacccaatgggtagaaagtccttgcaatcttaactttcttccatctttatccttaattccaccctgtccacagggcattgtttcccaccttagccttctaaggaacatgcacatagcaattttcagctaccaagggtttttacatacatttaatcagcacagtaaccctgagaaataaatatgattatatcctcattttaaaatggcacctaagtcccaatgggatagtagcatgctttttttttttttttttttttttttttttykgagatggagtccagccttgttgcccaggctggagtagagtggcacgatcttggctcacctgcaacctctgcctcctgggttcaagcgattcttctgcctcagccttttgagtagctgggactacacgcaaatgccaccatgctcagctaatttttgtatttttagtagagacgaggtttcaccatattggccaggctggtcttgaactcctgaccttatgatctgcccatctcagcctcccaaagtgctgggattacagacgtaagtgaccgtgcccagccagcatgctcttaaataagattgatgtcaccccttctgacctcagatcccatattctttccactgcgccacrctccccctggcttccttaaggtgggggctcttttttttttttttttttttgaccattgggaggtaaacatcttaaaagcaaattttattctggttacattcattagcagaaatactttcatctgacacagcattaggtcaacaactttaaaccccaaactaccttttttttttttttttattgatcattcttgggtgtttctcgcagagggggatttggcagggtcataggacaatagtggagggaaggtcagcagataagtgaacaaaggtctctggttttcctaggcagaggaccctgcggccttccgcagtgtttgtgtccctgggtacttaagattagggagtggtgatgactcttaaccagcatgctgccttcaagcatctgtttagcaaagcacatcttgcaccgcccttaatccatttaaccctgagtggacacagcacatgtttcagagagcacagggttgggggtaaggtcacagatcaacaggatcccaaggcagaagaatttttcttagtacagaacaaaatgaaaagtctcccatgtctatttctttctacacagacaccgcaaccatccgatttctcaatcctttccccaccwttcccccctttctattccacaaaactgccattgtcatcatggcccgttctcaatgagctgttgggtacacctcccagacggggtggtggccgggcagaggggctcctcacttcccagtaggggcggccgggcagaggcgcccctcacctcccggacggggcggctggcygggcggggggctgacccccccacctccctgccggactgggcggctggccgggcggggggctggaggtgggggctctttgtggaggagctcagggagacttactcttcactcctttcctcaccctgccagctccttggtgcccgggcccgaggggtagccatgctgggtgtgttcctggtctcckcagtggcccatgagtatatcttctgcttcgtcctggggttcttctatcccgtcatgctgatactcttccttgtyattggaggtgagctggtctctgtgccactggaagggagccatccagagggaggcctgcatcctgctcctgcagatcccagactgatggtgggaggcctcgcccccaggcctggaggyaaggctgctgagactgagaggtggagtcaagggggtacttggaaagcagggagggaggcagcatttgggaggcagccaagctgtatcctggggcatgtgggaggaggtttctggttggagaggaatatttgaatagatcactcatggaggaagacaaagaggaggaaactgggatgaggctgagaggctcagtatgagattcaggatattgaagtacaaactgaagaatcctggttttacatgggccactttagacctctacgaatttctgcacctgagttcaagatcttctccaatggggccttcttgttccatctcttcccaataccctggaatgggagggaagccagggagacaaggcactcctggagctggaatgacaacctttcctcctgcaccaggaatgttgaacttcatgatgcatgaccagcgcaccggcccggcatggaacgtgctgatgtggaccatgctgtttctaggccagggaatccaggtcagcctgtactgccaggagtggtacgcacggcggcactgccccttaccccaggtaagagaccacaaccctcatccagctccccatccatgaggacacacagaccaacagccagtccctccttgttccccaactcaccggccacagtcaggcaccagggcctggcttgggggtgatggactctcacgtcttggatgcatgggttgagtcaccaggmatgatctcattcacgacttattcttctctggctcaggcaactttctgggggctggtgacacctcgatcttggtcctgccatacctagaggtcgggacagacgacgctacctgcccagacaccaccaagttctctgcctgcaaaacctgggaccaggactcctgtcygcattcccaaatttggctctgagtcgaggcaacctgcacacaagaccccaccaaggaatgtgcaaggactgagatctgcagacttgtgggtaactgatcacagacctcagcatgggggtgaccagggtgactcttcaatccctatccccatgggctgggtacaggatatcctcctaccccatgactgtcttagggagacttggggtaccttatggatttgatgaatgtgggggaactcagaggaactggggccaccaaggttggaaaagggtttggttcttgactttgtattccttccaatacagcaataaactttgtctccctttttattcattcattcattcattcattcattcattcatcatttgtggaaggctcacttggatttttgtagagttgtgtctgcagaggcaagactttgtggtaggatgggtgagaatcttgggtgccccctgccttaccttctctatgccaccaccatctcccagaaacctgacccttcttccacctcttctccagctcatattgaattttctagcccctttaatccttctgctcatggcatgccctagcacattttgagaggacacgtagcaggcctcctttcctttagtagattcaggagaggcatgcctcgtatagacctgaaatgaagcttttaatttcgtgaaccccagtttctacaactataaaagggacattaaaattaggagtgtcccaactgaaggagacagaaggtcaaaatacttctgttcaaaactgtttcagaaaccagactatgtggtctgccctccccacactgattccctgcctgatgtggttctggggagacatctgtgtaagaaaagtggggaacattagtctcaggggggctgaggaccaaaaaatccagggtccctaagagagagagatggggtatttctttttttttttttttttaacacttcaacagtgtgtataagacatctttttttttttttttgagatggagcctcgctgtgtcgctcaggctggagtgcagtggcgcgatctcagctcactacaagctccgcctcctgggttcacgccattctcctgcctcagcctttggagtagctgggaccacaggcgcccgccaccacgcccggctaatttttttttttttttgtattttcagtagagacggggtttcactgtgttagccaggatggtctcgatctcctgacctcgtgatccgcccatctcagcctcccaaagtgctgggattacaggtgtgagccaccgcgcccggcataagacatctttttatgtcaataaatatagatctattttgtcacttttatttatttatttgtttttatttatttatttattttttagacggactctcgctctgtcgcccaggctggagtgcagtggcatgatctctgctcactgcaacctccacctcctgggttcaagcgattctcctccctcagactcccgagtagctgggactacaggcgcctgctaccacgcccagctaatttttgtatttttagtagagacggggtttcaccatgttggtcaggctggtctcaaactcctgacctcatgatccacccgcctcggcctcccaaagtgctgggattacaggcatgagccatcacacccagactcttttctccctctttttatgccttcttttgaataaattattattccacaagtggaatgaatgatacatttttatttcatttctgttatcttattgtatgttctttactcatcccatgatttagctttgtagctcatgttgctattctttcatttcccctaccccattgttattttggatgttctactatatttttccattctcttgttagttaccttcccttccagcaataataataaaacacacattatgattatttgaaaatatgccaattatgtattccattaagatgtttcatgtcctgcacttctaccaataagagacatttagaatactttttcttacctctctcactctgcttccaactcctgggtttttctgagataggatagtacttttggttgtagatataattagatgtctatcaagctccatgaacatttaactgtataatatttttctttctaagtttgttgctcactacttgttctttattctcttcaccttcctctatcttgatttctctgttctgtaccaaaccattctttcaggtgaggtatgagattgatatactctctgaatcctttggatctccaaatatatatcttttgccctgataggtgaaagttctctcagctgggtatgagattcctgtgtaaggctggatgcagtgactcacacctgtaatcccagcactttgggaggccaaggtgggtggattacttgatgtcaggggttcgagaccaacctggccaacatggtgaaaccccatctctactaaaaatacaaaaattagccaggtgtcatggcaggtgcctgtagtcccagctacttgtgaggctgaggcaggagaattgcttaaacctgggaggtggaggttgcagtgagttgagattgcaccactgcgctccagcctgggtgacagaacaagactcagtctcaaaaaaattaaaataaaaataaataaaagactcctggccgggcgcagtggctcacgcctgtaattccagcactttgggaggctgaggcaggtggatcacaaggtcaggagtttgagaccagcctgaccaacatggtgaaaccccgtctctattaaaaatacaaaaattagccgggagtggtggtgcacgcctgtaatctcggctactcaggcagctgaggcaggagaatcacttgaacccagggggcaaaggtcgcagtgagccaagattgtgccaccgcactccaacctgggcaacagagcgagactccatctcaaaaaaaaaaaaaaaaaaagaaagaaagaaagattcctgtgtagtcatttatttctctcagttttcccactttgagcctccagtgttgcagatgaaaagtcccataccaatgtgatttgtttccttttgtagataacttgctctttctgtctaaaaacttgaaaatgtttttctttaaccttgaagtttgggagtttcatgcctgtgtgtatgtcttttcttgttgtatcttcctgtttcctttcagtcttcaagctcagatatttcttcacgtcagcaaaattttcttctattctttattgcttctcctccatctattccttttcccccttttggaactaatatagttgaatttcaggactactggatctactctccaagaatcacattttcctcattatttccatctcttcatagtatttgctccatgctttgaaatattatttccacttgttcttccaagccactaatttgagtctcagcagtgcctattctctctttcaatacatatactaatttttttgttgttgaaagtgttgtttttttagttcccaaaagttgtttctttctttttccttttttttctttcttttcttcttcctctttttttttttttttttttttcatactacttgaatctctaagtgctcctaattgtttaagttatcatatatctctttcagtggctactgtgctttctggtgggcagggaaacaagctatcataactgcatccctgcagggccaaggctctctgagtcacattcttccagtgttcccatggtcctgatctctctgctctgggtgcttcaaagctggtctctatgcagtgagagtgaggaagctcctcaccaggtctccacaccaggacttcccccctctaaccctaagttaaggctttaattggcaccctgcagcctggctccagcagcaacatggctaaatgtttggaaatgagggtggaatagagtggaaattgccttagaactgtagttctcaaactccatcgtgcattagaactaccttcggggtttgttaatacagagtttctgattcattaagtctggggtcaagcctgagaatgtgcatttctaacaagtttccagggsaagcccttgctgctgatctagggaccacttctttagcatacaccgaaccaagccctctttcttctcctcctttttttcctttttcttcttcaaaattattctttcttttctttcttactttttttttctttttttttttgagacaaaatcttgctctgtcatccaggctggagtataggagtgcgatctcagctcactgcaacctcccgctcaagagattctcatgcctctgcctcccgagtagctggcgttacaggtgtgccccactgcacctggctaattttttctatttttaatagaaatgggatttcactgtgttggccaggctggtcttgaactcctggactcaagtgatctgcctgcctcagcctctcaaaattctgggattacatgcatgagtcaccgcgcccagcccaaaattatacattctttttatggtaaggaaattaacccaatgtcagggaattatctcctagttttatgtttagtcttcctactagttcacggtactgggacttgtacacgaatgagctccatccaggcgcctcctccaccgaaacgctcatgggtgcatccctgacgagcccaggtgtgtctaaggaggaggcaccagcggggacccgaaggcactccaggcaggacaccaccactgggctcacctgaagatgagtaaaggtgggtcagaccagaagttgccatctgtgcatggcctcaggcccccctcctctttggacacccttttattattagctttgtgcccacacagccctcccttcaggatcctcaggggtcagagggctgtggttcgggaagtacctagggtggcagtaggtggtgaggctgctgcccggcaggactttcctcccctgctgagagccacctttcttcctgtctacagtctgcgagtgttgtcccctgtgtgtccccagactgcacccaactgcttgttacagacaccttcccttcacccctttgattttgcctagtgtttccccttctttaaatcaccttgcctgtcctgggacccttatagcactcgctctgctgtcctatggtcccctcccgaatctgtgctgtccagtgtctgtgacctctgtaacaccccacacctcactatccatgctcctctcatgctctgccatgcggagctcctcttccataacacacactccaccgttctacaacacaggcttcaaatgggcatttcagcaaagtccaatgaccytaatcttaatctgcatgcaggatttccttttttttctttctttcttccttttttttttttgacagagtcttgctctgtctcccaggctggagtgcagtggtgcaatcttgactcactgcaacctctgccttctgggttcaagcgattctcatgcctcagcttcctgaatagctgggactacaggtgcatgtcaccatgtccggctaatttttgtatttttagtagagacgggttttcaccacattggccaggctggtcttgacctcctgacctcaggtgatccacccacctcagcctcccaaagtgttggaattacaggcgtgagccaccatgcctggccaggatttcctttccattcttcaaaggaactatatcattcattctctcttctcccatcatccctctccaagcccacagaactccccagcagctctcctctgccccaattccttcctgttaactgaagaaattcgccctcttccctctcctcctaccatctcactcaatgatatcagcagctctggcaccatccctccattctcccttctactagattgctcccaacagcagccagctatgctcctagtctactctccctatgtctaactgtccctctcctcccccacagctacatcaggctgctgtcccacttctcagctccctgtcacagccacacttctccaaagagttgcctgtccccactgttgaggtttttcacctcacattcactcaagtgttgatcataggtctgcaaaggggcctctcatattttaatatgggttatttgctccagtacacaagccttcctgttatttcccctctcatcagatggacccactttgacacatgacaaatctgtatggattcttgaaaatgtagtgctttattgtaccttttaaatttatataaagggtttagtcagctttattcaaatataattcacatatcatacaatttgtccacctaaagtatgcaagtcaataatgttagtataggccgggcgcagtggctcaagcctgtaatcccagcactttgggaggccgaggtgggtggatcacgaggtcaggagatcgagaccatcctggctaacatggtgaaaccctgtctgtac

SEQ ID NO: 96147 - DNA, 50238 bp, Homo sapiens
tacatgggaaagcataaaaagattttctttaaaaaaaatttacttggaaagtgataatcacttattaaactaaagccaccattgttcaaaatatttttgaaattcaaattttgaaactgtcttcagaacttttagtattatcttttatacagttttgctttgttctttgaagatgatgtctttattaacgtattcatgtctttattaacgtactcattcacaaactttttaaacaacagaatatttggtgccaggtctggtgaagacaaatgtttaagctgtttgaagtcaatatataaataaggcaagaatataaagtacttgatgctgacaacagtttaccagtaatgatccccacatccttaaacatgtttctagaacaacatctttgaaataaattggaataaattcctgagtgataaaaagcctcttggctgcatctgttctgatgtgtaaaatcaagttgttttatttcacatctttttatttatttttttgagacagggtctcgctctgtcatgaggctggagtgcagtggcatgatcttggctcattgcaacctctgcctccagggttcaagtgattctcctgcctcagcctcccgagtagctgggactacaggcacacaccaccacagccacctaatttttgtatttttagtagagatgggatttcaccatgttggccaagatggtctcaatctccctacctcgtgatccgcccgcctcggcctcccaaagtgctgggattacaggtgtaagccactgcacccggcctattttatttatttttttaagagatgaagcctcactctgttgcccaagtgcagtgatgtgatcttggctcactacaacctccacttcctgggttcaagccattctcatgcctcaacctctggagtagttgggattacaggtgtgcgccacgtctggctaattttgtagaaacagggattcatcatgttggccaggctggtctcaaactcctaggctcaagcgatccacccaccttgcctcccaaagtgctgggattacaggcgtgagccaccacacctggcccatatctttttatttttaagactatttacaggccaggtgtggtggctcacatctgtaatcccaggactttgggagaccaaggtgggaggattgcttgagttcaggagttcaaaaccagcctagagctcatctctactaaaaattttaaaaattagccaggcatagtggtacatgcctgtaatcccagctactcaggaggctgaggcaggaggattgcttgagcccaggagtttgagactgcagtgagccatgatcacaccactgcactccagcccaggtgacaaagcaaagctctgtctcaaaaaaaaaaaaaaaagaaaaagaaaaagaaaaagaaaaagaatacttatataaatatcagctaaataaaactgaaaacattcttttaattttttggttcaagtaaatttgctactctataataatccagagtaatttattacatggcttccatatacaacgtgacttttctcagacccaaaagtatctgttattctctcttctgcttgacctttttttgagaacctgtctgccatgtgaggctttccatgataggcaccctgcctacctctccagtgtcatgtaccactcactccctgccccacaacgcatgctccacagtcactaacccactctgtacgtctccccttgccccgcacccactcctgtgggcaatccattagatcttagggatgaggagaaagcagcaaaggagactaaggcggcagtttaaagacattcaatgctgctgacgggagacaggttttcaaataaggtccaaagatgctaagaggctttaaaacaaacaaacaagcctggatctaacagacctttggtaaccctgccaggagcaactgctgtgtagtgcacttttgagagaatgggaaataagggactggagacatgagaagactgaactctctttaaaacagttttgttgcaaagggagcagagaaatggagcagtagctcgaagtgggaactgggatggacagaggacttttgagtggcttttttcttttttttcttttttttttttttttttttgagacagagtcttgctctgttgcccaggctggagtgcaatggcgtgatctcggctcactgcaacttccgcctcccgggttcaagcgattctgctgtctcagcctcctgagtagctgggattacaggcatgcgccaccacgcctggctaatttttagtagagacggggtttctccatgttgatcaggatggtctcgaactcctgatctcaggtgatccacctgcctcggcctcccaaagtgctggaattacaggtgtgagccactgtgcccagccttttccttcttcttaagaaaggagaaataacagcaagtctgtatactaatggagatgatccagtagaaaagaaaagactgatgatgcaggagacacctgccggaatgatatcccagagtaggtgagggggatgggatcagaaacacaagccgagggctggccttatgtgaaagcagtgacagctaatccatacagcaggagggaaggtagaagataccgagagagatgctgacaggtgggtagcttgcatgagttgtgttactaataaaaaatcaagacacatgggataaagtgtttgaaaggtgggaaagtcccagaaaatctaagctgatggccattataccaacattacaacatttgccatctggggagtcaggattatactctgtcagggaaaaaaaaaacaacttcacttgtaatattcacaaaagtcatgtgcttcacttttcctgccttacattccttttccactgctaaagataattaaacaattattcactgaaacttctatgtggtttgaacaacagaagtggacatttagtcgtgtcaaactttagctgctgtttaagagctgcagaaaggtttcagtcctctttgagatacagagcctgcagcccaaggttgtttttagttttcttggtcccctgataatgctaatacatcaactgagtagccttggctcactgttactatctaacaagcccctgaacccagaatgtagtcagctggcagttagtaattgagaacctgtttggtgacacggatgactgaatggggcccttaagtgttccatcctattgacaggggttgacaccttgacttgttcagagagttgggccaatttgaaaaatcctaaatctgtcatcagtttaaagactttaatcccatctaaagacaccaaactttgttggtatgatgctgttggctgcattttttccccatgtaaaaattcttcatttctttagccatttctatgatttattattttacgtccaacagtagtggccgtctccagaaaaacagccagccttcatctttcaaataaaatagacatgtctcttgctttcttgccaagggaaataactgcttcctacagtttacagtcttctactcattattttatttccccaagctactgtttcagatatcttctgcaatgacaataaatatcctcaaaaggtaggagaaaaaaaaaaaagaggataacttgcgaataatattacccattcaagtcataaaaaactaagatgtttcaagaatactatataaaagtaaaatgttttacagtgttatattattaaacagcagccaagaaaagtctagatacagccattctgtttaaatgaaaatgtacacggcatgaattacgcatgtgcatttaaagaaataaaaagctaacagacctaaacgaagacaaaatgtaaaaattactcatagataaaatactgctaatttaagtttgttatcttaagtcagaacaaaaatataaaaaggcatagaaatagtgactgaatgacaactgcgtatgtgaagcactgaaacaggttgacaaagcatgggatcaatcttgaaagaacttacaatcaaaggagatgaaaaaacatgctgatcattgagtaaaacttaccactaaaagacatatcttataaaaaactgaattctcttcaagcctaatataaaaagaataaaggaaaacggcatgcccaactggtagtagcaattactacttcaaaacaaagaatacaaacgtagacttcatgagacaatcacagtaaagtcatttcaatgcttttttttttttttttttttttttttttgagatggagtctcactctatcggcaggctggagtgcaagggcgcgttcttggctcactgcaacctccgccttccggattcaagcgattctcctgcctcagcctcccaccaacacagtgaaactcccgtttctataaaaatacaaaaattagctgggtgtggcggcgcatgtctgtagtcccagctacttgggaggctgaagcaggagaatcgcttgaacccggaaggcggaggttgcagtgagccaggaaagcgcccttgcactccagcctgccgatagagtgagactctgtctcaaaaacaaacaaaaaaccccataaattctaaactgactaggaaacaactatacttccgaagcctgtgacggatctcagaataccacaaagttccctggacagaaatttagctacaaacataggcagggcgcaatggctcgtctgtaatcccagcacttagggggcggaggcagaggatcgcctgaggtcaggagttcgagaccagcctgaccaacatagtgaaaccccatctctactaaaaatacaaaaaattagcccggtgtggtggcatgcgcctgtaatcccagctactcgggaggctgaggcaggagaaattgcttgaacccaggatgcggaggttgcagtgagctgagatcaggccaccgcactctagcctgggtgacagagtgagactcagtctcaaaaaaaaaaaagttagctacagacacagttctcaagtctgaacttacatatttaaggacgcatgaaaacaatcaagcttatattttgtcaatacaaatggccagaaggattccctggccattgcaatttcaaaaattttggaaatatttgcagaggtattgttaaaaacctaaatgattcatttatgtaaaccaaagaagcgtagtcaattttttaaaacggcataccttatgaaagtgatttttttaaaaaaggtaacaatgtcttttgaaaacttacttctcatattaacgtctataggatttacactggcagcgtgaactttgacaatgacttcatttggatagtgtatgataggcatcatcatgttctgagtgaatcgaagcacttcattcttcccatatttatctatcacccaagcaggcatgacagtgctcctaggagaggtagtactaatccttctaactgaaggcttttggacaactttgcttctccagaagcaaaccgcagtgcatgcatttcttctaagtacacaagtcttcagaaattccattgtaaacactggttgaactgcgtgctcaaattcaaatacacttggactggatcaaactctcacccctgaattcagtcaaattctgccaaaccacgggctagtttcaaaattaagcatgcaaaacggagcattcgaaaatgaagctaatctaatggagaaactgaaagaagaatacggaactgttattccgctcttcgcatatgaaatgctcgaattaacgttccagtcagtattctgtccattctcctccctcactttcaccccctccactttaaaaaaaaaagggggggcggggcattaaaaagcaggtgcgcaaaccccctagatccctgccctgtcctgggagccctcggcgggacaagcagacaccgctcgcgatccaacgccagagaatcgaacgcttgccgactgccgccgcgaccctggcccggaatctccttgcctgcccgctctccttagccgccgggatggctttgcggcgccaaccaatcgcctacaaagatcatttcctcgggctgcaattcaaccaatccaagtactcggtgttgaagggctcagtgacaattaaagatggctgcgcccatgtaacatcactagcgaccggtracctmtttttcccccttgcctggctcctgtggtggcaggctgggcacraggaccatgctgggccggagcctccgagaagtgagtggaattggcccgctgaggcccccgggagggcggaaagtttaacggacttcgttgacaaagagtccctgggccttaccacgcatcttggcccacctcgctgcttcctctagaactgagtgggggataagtacctttcgattcttcgggtgtactcgccgtacccattcaggagttaggaccttagcagggaaatctctgcaccgcggatctgtagggtggtgaagcggcttctcaccattagacatttgctctggtgtaggtcgggatccggatggtctcggagtgggctttgccaaagggggcttgcggggccacttcagtctctcttctgtccccgacacttagctgcagttgtcgctaagaagcccggcgaaactgtagtttgcaaaattcaaatgagtaatttttggcttttttcaaagaattcgttctctaggatttacctaccactaagataccagtgatttcctaacccgtgtctccatgtcctggacgtcgtgtttgaattctagactgtatttgtgaatgctttctgggcagttcttctaaatgtcacataagcaccctcaaattcactttaatcggtgttgaagtaatcattgtaacaggacttacctctcaacccccgtcttaaaaaagctctggtatttctgaattcttaatagactctttttaatggcacaactattatctcatttgcctttagattcttcctcatctttcatatccaataaatcactaagccctcttcattctatcttgcagatatggctggaatctgccctcttacgttatttctgctgttatagctttaattcgggtctttttgcttcctggttcacgtcactcaaccttagaactgtctgcaggcccattgctatcagagtcacataaagcacctgttgaaactaaaactatgccccactctagacttaattagagctgtgtggtaagttcgggagtatggtttaatggaggctccaggtgatttctggtaagaagtaggcgctgatgacctaaactgccttccatcttcctttttattccaccctagaagttgtcgttttgtttgtttcccagctggcagcgtggaattataattatagatagctgtaatatataatgagaaattgaaatccacaggctttaaataatagttcttcccccaaaatacattattatgttatcattttaaattgcgtcgaatcaaatttgttctttaaaaaataaatatgcccggcgcggtggctcacgcctgtaatcccagcactttgggaggccgaggcgggtggatcacgaggtcaggagatcgagaccatcctggctaacacggtgaaaccccatttctactaaatatacaaaaaattagccgggcgtagtggcgggcgcctgtagtcccagctactcgggaggctgaggcaggagaatggcgtgaacccgggaggcggagcttgcagtgagccaagatcacgccactgcactccagcctgggcggcagagcaagactccgtctcaaaaaataaataaataaaataaaaataaataaacagacaacacccaaaacttgttttaaaattaaatacaacctataaaaatatgttatttcctttttctgccttttccactgtcaatctaagtaacagaaagagactctaaagaaaatatttattttggagtagcaatgcaatgggaatatgtgtaatattgtaaactatgtgcctattcaagaaggttgaggcaagggatgtttttaaagacagaatgagaaggattacttaaattattttgaatcagttatccttggccacaaggatcagtcacaaaggtggcatcagtccaaggttggatggccagttgctggacagacattcttacagaagtactcgtgtgtgtggaaggttgcaatggcctttgtgcaaggttgtgttttttgcagtcttatgattgtttttaaaaaaaaattttaatgggtacatagtaggtgtatgtatttatggggcacatgagatattttgatacaggcatacaatgcataataatcacatcagagtaaatggtgtatccatcacctcaagcatttatcatttctttgtgttacaaacgttccagttatactcttttagttatttttaaacgtacaataaactattgttgactgtaatcacctgctgtgctatcaaatactgtatcttattcattctgtctaactatattttgtacccattacccatccccacttcccacccctactactaccctttcaggcctctagtaaccatcattctactctacctccacgaggtcaattgttttcatttttagctcccacaaataggtgagaacatgggaagtttgtctttctgtgcctggcttatttcacttaacataatgccctccagttccatccatgttgttgcaattgacaagctctcgttctttttatggctgaatagtactccattgtgtacatgtaggacattttctctatccattcatctgttggtagatacttagcttgctttcaaatcttggctattgtgaatagtgctgcaataaacatgagagagcagatatgtctttgctatgttgattttctttcttttaggtgcatatatacgtagcagtgggattgctggatcgtatggtagttctatttttatttatttatttttaattattttttttttagagatggggtctcactatgttggccaggttggtcttgaattcttggcttcaagcaatcctcctccctcagcctcccaaagtgctaggattacaggtgtgagccactgtgcccaaccagtagttctatttttaggtttttaaggcacctccatactattctccatagtggctgtagtaatttacatttcatccaacttttctccatcctcaccagcattcattattgcctgtcttttggatagaagctattttaactggagtgagatgatatctcattgtagttttgatttgcaattctctgatgatcagtgatgttgagcacattttcatataccagtttgccatttatatgtctttcttttgagaaatgtctattccaatcttttgcccatttttaatttgattattggattttttcctgttgagttgtttgaactccttatatacttcggttatcaatcccttgtcagctggagtgtgatagttcttcttatcaggcattcatgcgtgagaaccctctcttcttgaccttccttggctccatttgtcaggattttaacacaagtcactctattttgattttgacaactgtcatagctccttaagtgctaccttttttagtgctacttctctctggtgtcattgagttagccattgtgaaaaacaacttttgccgcatggggggagaaaagaactatttaggagagctgaccyaggggaaaatccagaggttgccttggcatgattrcttttactttatcactcctttaacaaatactgattaatgcctagcatgcaaaatatttggtggttatttccccagctctaaaactaccttctgtctactttgtattttttccacatcactgtactgttgccctaaattctaccaattagagattaattaattcatacaaattatcttttaatttaattctcttttaaatatgtacagatgcctgggaaggttgaacaatttttycacccattgttgtaaattataacagttcaaatttcttcataataccttaattgagataatcagttgaagagggggaaatttgcggggaattagggagaagggctggaaatgatggcagcaatttgggggatgtgagtggaagcttatggtaacaggagtcctgggaataggcacaaaaaggaggtaaaatgccaaataggtaaaattcccatttgtaaattttacccaagtacattcagaaagggggaggaaatctcacttttacctttgtcttttgtggcatgatcccagtgtttctaggagtgaggcaccaggctaatattattaatcctaaagtttaaagaatgatatattcatttggcttcttggagcttcaactttagaaaaactaatcattgttctatagggaaatcgattctaaattttaaacaactgttattcattcaactaacatttagtgagtacctctgtgttccaagtactggggggtagcattaaagacggacagaagctcctgcttcctgaaacctaacttttttgtgtggaaacgcagccattaaacactttaaaaaaaaaaaaaagtaaatgatataatttcaggtagtatgagtactatggagaaaaattaagtagatcatagtatgagaactagttgggggagctggacattttagctagagtggtcagggaagatttctctgattgagtgaataatacttaatagagaccagaagggcatgaagggggaacactgggcagatctgagagaatagtgttccaggcagatggaacagtaagtacaaagaccctaaaacaagagcaagcttaacatgttcaaggaatagcaaaagggccaatatgcctggagagaagtgaatgaggagagcaatgagagaagaggttagggagacaggtaggagccaaattgtggagaacctttgaggccacagtagggagtatggattttattccaagtgtaatgggaatcttctggaaagttttgaatctgtggacatgatctgagttaaaattttaaaagctccttcagatgactcttaagggaccatgatctttagaaaagcaagtaataaagcacaaagactgaccgggtgcaatggctcacgcctttaaacccaacactttcggaagctgaggcaggctgattgtctgagctcaggagttcaagaccagcctaggcaatgtggcgaaccctgtctttacaaaaaatacaaaaattagctgggcatggtggtgcatgcctttagtcccagctgctcaggaggctgaggtgggaggatcacttgagcctcggaggttgaggctgcagtgaggcgagatcacatccgtgcactccaggtttggcaacagagcaaggccctgtctcaaaaaaaaaaagcaagaaagcatgaagaccaattagaagcctgttgcattggcgagataatgggagtggatattgttttttaagtcagggtttgcagatgttttggatatggggtttgaggaaaagagaagaatcaaggaggatacttaggttttgggctagggcagttggggaaatgtgacatcaagatgggaaaaccttaaagggaacatgtttggaaggggaaggttatcaagagttttgttctggatgtgttaatttttagatgcctcctagatatccaagtgaagatatcagttaagcaactagatacaagagttcagagctcagaaaagaggctaggtaagaggatatacattggccagagtgtagaagataattaaagctatagggccagatgagattacctgggaagttgagtgtaaaaatagaagaagacctaaaattccaacattttggaggtcaacaataggaagtaaagccagcaaaagagacttgaaagaatgcccagtgagacaggaggaaaaccaggatggcatggtgtcctgaacacagagaagaagtgtttcaaggagggagtggtcacttgtgttgaatgctactaaggagtactataaaatgagggctggtgctgaccagtgggtttagctatgtggagcttgctggtgatcttgatacgcagtttcaagaagcaagaaggcaaaagcatgaatggactgtgttaaagagaggatgagtacccatcactggaacactcagccctcaagagctctcctgtaccttcagcacttaccaaggcaaactttttttaaagaccattcttttctggctaggcacagtggctctcgcctataatcccagcattttggaaggctgaggcgggcagatcacgaggtcaggagttcaagaccagcctgaccaacatggtgaaaccccgtctctactaaaaatacaaaaattatccaggtggtggcacatgcctgtaatcccagctactcaggaggctgaggcaggagaatcgcttgaacccgggaggccaaggttgcagtgagccgagatcgcaccactgcactccagcctgggcaacagagcgagactccatttcaaaaaaaaaaaaaagacagttcttttcctaagtgtacctctaatgctgtctgttaagttaattaaaatgtctccacttcattacagagaaataaatgccaaaatgtcttgcatagagaataattatacaggttgaacatccctaatctgaaaatctgaaatgctccaaaatccaaaactttttgagcaccaacatgattttcaaagggtgtgttcaaaggagatgctcactggagcattttagactggagatttttgggttagggatgctcaactggaaagtatatagtgcacatagagtactccaaagtctgaaaatatccgaaatctaaacacttcttgtcccaagcattttggataagggatactcaccctgtagtatagtaagtagttcagagcatgagttttggaaacaagatgagtcctcggttgaatcccagctctgctactttttttttttttttttttttaagacggagtctcgctctgtctccaggctggaatacagtggcacaattttggctcactgcaacatctgcctcccgggttcaagcgattctcctgccttagcctcccaagtagctggaactacagatgcacgccaccacgcccagctaatttttgtatttttagtagagacggggtttcaccgtgttggccaggatggtcctgatctcttgaccttgtaatctgcccgccttggcctcccaaagtgctgggattacaggcatgagccaccgcgcccagccagctctactgctttttagctatgtgacctcaggtaggaacttcagtttttttatctgtaaatggagataataatagcttctcagtgtggatgtaaagattaaatgatatattaagcactgaggacaatgtctagaactaagtactagctattattaacattaattttgttacagggacaaaattactaaattatatgtatttgcatttttcccttccyttactttctaagaagagtggttcctgagcaagattttaaaatttttctaaggaggtatattagttgtctatggctgcataaaaaattactataaactttgtggcttaaaataacataatctcaggatctcacagttttctgggtcagaagtcagggcatggagtagctgggtcctctactcagggtctcacaaggctgaaatccatgtgctgcagttgcactgcaaggtrttgctagggctagagttccatctggagctccagccctctcgacctcgttggtttctggcagaattcatttcctgtggttgtggaactaaggtccgattttctgctggctgtgtggatagtaaagtaagtgagctgaagggctggagacatgggatggctggagttgacattttggagatcaaacggatgttagtaatgatgtatatagtctagacagtgaccaggagagttggcaactggggtgaggtgaaggaaaagcttgtgcaaagtgagatcaaagaactgaaaaatcagatgttggtgtacatggacttgaaatatgatgtgaacaagggagaggataggagcaatagtaacaaagatgacagtgtgctagccagcaaaattgtcaatgaatgaaaagtagtaccaggaaggcwataggtcagcatactggggagcgtggtgtcatctcccaaggcatgtgctttgggtgagcggaatgtttgagagaagagggaagagaagcattgaggaacaaggagatcatctttcccctctcccactctggactctgtggtatgtggtaggtaggcactaaacaggagaagcagcggctgccagggaagacctagtttccattagagaaaagatgtgccagagagagaattttttttcttttaacraaaacttaaaagttaacttcgttttatattcagatttgacacctgcagttttgtcctggggaactgtatatgtgatttatgtttcctgcttcttatgctcagtccatttagctgattagcatctttgttttcacttctcttctccacttcccttattgattttttttctcaaatctagagttcctaaaaatggtcttaatgcaaatcggcaccatttaaagtgaatatcctagacaatcttatttcttgctgttcaaccacaattgtaacaccttagcttttatccttataccagtctggaagcagcttgaggattgtaggcattaggggacttgagaggagtcaaggaaggagagaaagtggcaaatgcarttttcctcattgttacaacttagccatgggatgggcctgcctacgtatatttgtctctctagctctgggtttttgttagttctaactctcttccacccagcctactaccatctttgttcttcccattccatatacatgatgttaaaacgcactgctctcttttattccttctagcttctttcttctagagggtttacatttctttttttttcttttttgagacagagtttcgcttttgttgcccgggttggagtgcattggcacgatctcacctcaccgcaacctctgcctcccgggttcaagcgattcttctgcctcggtctcccgagtagctgggattacaggcatgcaccaccacgcctggctaatttcgtatttttagtagagatagggtttctccatgttggtcaggctggtcttgaactcccaacctcaggtggtctgtccatctcggcctcccaaagtgctgggattacaggcgcgarccactgtgcctggccaagggtttacctttcatacaaaccattagacgaactctctcttcttgttactataaaagtcacttccttaaatcggaccttgctgccctccttatccctgcagcaktcctgcagcctccccatggaagtccttttcctcttgtcggtgagcattagggatcctcttgatgacctcttcccactgcttgttgcatttaaaaccctcagccccaagaatgccattgcgttgatgatttactcagtagctaagagcagatcatttggagattttcccctcaaatgcaaacttctgttgctttatggaacacgtgaaaacactgtcaacttggaggacaaactaagcttccaatagagtagagatagaaatggtgaagactgtatattatgaggtcaccttgtcctttactatttgtgtgactttgggcaaatcactcaaggtttctgagcttcagtttctttatctgtcaaatgagataaacagtacctaacttgtgtggttatttgtgtgttttgttttttttttttttttttttttttttttttgacagagtctggctctgtcaccaggctggagtgcagtggcgcgatcttggctcactgcagcctccgcctcccaggttcaagtgattctcctgcctcagcctcccaagtagctgggactacaggcacgtgccaccacacctggctaatttttgtatttttagtagagacagagtttcaccatgttggccaggatggtctccatctcctgaccttgtgatctacccgccttggcctcccaaagtgctgggattacaggcatgagccactgcgcccggccagtgtggttgttttaagggttaaatgaagtaataatgcatgtaaagcaacagtgcctggctcttggaaaatactcggtaaatactattccttcccctattctccttttctctcagctcccatctaattcaattatcttttcataaaatctccaaagttttggtgtcatcttttacttattgttattcatcccttttatctgattagtaagtacatgttattattacttcctacaggaaatattagacactcatcactccatcttaggccctacttcctgtcaatatacactggtattcactacttcccagtcactttcggtgcrgtttttttttaactccttctttaccagccttcccaatgtcttccctaaagacagaatttcagaaaagtttgtttttactttgcctttgaacccgtattttataagcatttctcttaattcatagtgtctcttactcgaactccacaataggtataaagatcttatttagagagccataaaaatcctgcaatgcctcgtccagttcacttctctttttttctctctggactgcctgtgttgcagctaagctaccctctgtacagaatctgccctcagccatccttcacccatgctgggcctcaactccccctggacaggatggtttacctaacttactgccgttgtttgtacagcctgactttgaaaccaaaagttggctaaggagaagaatgtcatgtcctccacctgtcctcaagctgatcagtgcatcacccttcatccactacactaagtgtagaggtaataggttctcttgattttgaacccaagcctcactttaaaatgttatacttagccactccatctccccccacccccaccaatataacaattgaaacttctgcagactcagtaaaaggtttttgaattgtatacactataggtttctgyggcactgaaacaaggccaaattacaccaacagagctctgtcaaaaatgtctctctcttatcaagaagaccaagtttctaaatgcctacattactgtgtcagaagaggtggccttaaaacaagctgaagaatcagaaaagagatataagaatggtaaattgcttttaactatacttaattgttatatctccagagaagtttaattgtttgtagcagtctccatttggcaagtgaagctttaaacataaaccatagccttatttaaagaacttgccatgaggataataaaaatgagggtaatggctatgtgatgcttcataatgtccaactgtattaatttctgccataaatttgwtttctgaagaagtatctttgccaaaaactagtagttactgtaataacatgtattcatgtatctttatattttaaactatctcctttatcactcttttggctttttaatgcaggacagtcacttggggatttagatggaattcctattgcagtaaaagacaatttcagcacttctggcattgagacaacatgtgcatcaaatatgctgaaaggtaaagtttaactgatcagagcattgataattttataaaaataggtatttttcgctttaaggataataaagtaccaagataatctcagactaattatatctttgaaggaaatatttagaatataatatcatgtttttttactatttgctcttttagaatgcagaatttttctttagaggtcagccagcttaatgaatgctatctcagaagttttcaaaaattctattaatatttaggaagactcagttcaataactaattaccaactgggtgcatacctgtagtcccagctacttgggaggctgaggtgggagaatcacttgagctcaggagtttgagtccagcctgggcaacatagtgagacctcatctctaaaaaacgaaataaaaaaactgattaccataaacgtactgtataacctctaccttcagctcattgataacatgggaataagtatgaactggctatcatcaatacccttctgtggatgacgkgaggattcattaacatctactgaccagttattttttatttcctgattcctctatctcttgtagcacagtatggcaatgcttagatttattctttagagtttggtcaaaagaaagcaggtttatcaagatwtttggatcctaggaagaaacagaaatagaaaaaaggttattcagagtactagaygctaaaaataatattctatgaggaatatgccccaccttcctctaatatgcagactgttgttaattattttggaatatacgctagagcttttcaatagctagagaaaattttagttgaaaataaagatctatttctactggaaatacataaaaattactgtgtggtataacatgagaagaaaaaatcaagtacaatgagcaaaatagagatttactatttcaaaaatactgggtacatctctgactatcatgcaatattttgtagaactaactggtaaagtcagtgtttttagattataaaaatagtgaaggcacagactatctttggaaaacatacattagcagtagaaaaaaattactggaaggargtacaactgattatttaaattaggaataattaatacatatcactatgaattgcttaattgcagtttagactcttgattttttgttttttgtttgtttgtttgtttgtttaagacggagtcttgctctgtcacccagagtggagtgcagtggtgcgatctcgggtcactgcaacttccacctcctgggttcaagtgattctcctgtctcacctcctaagtagctgaaattacaggcatgcaccaccagacccagctaaattttatatttttagtagagacagygtttctccacattggccaggctggtctcgaactcctaacctcaggtgatccgcctgtcttggcctcccaaagttttgggattacaggcgtgagccaccccrccccrcygactcttgtttcttacatatgatttacatgttcgctgttttgtttcctataaaaaggtaactggccttttggcgggaaccaccatcatccagtaattcaccaaaatgatgaacacaaagggaaagaggagaggcacccratatgtgttttctaggccttttasaaaacagggagttgtttgccatgtacatgtgaacctataagaaaggtgatgtggacatcaagggaatgggtattgttcaaaaaggaatgccccacaagtgttaccatggcaaaactggagagtacacagtgttccccagcatgctgttggcattgttgtaaacaaacaagggcaagattcttgccaagagaatgaatgtgcatattgagcacagtaagtamtgtaagagccgagatagcttcctgaaacgcattgaggaaaatgatgaggaaaagaaggaagccaaagagaaaggtacctgggttcaactgacgtgccagcctgctccacccagagaagcgcactgtgtgagaaccaatgggaaggctcctgagctgttggagcctattccctgtgaattcatggcataataggtataaacaaataaaagacttctggactgtaaaaaaaataatagtaactaaatttttttcaggttatataccaccttataatgctacagtagttcagaagttgttggatcagggagctctactaatgggaaaaacaaatttagatgagtttgctatggggtaagtaaaattgaaatcttctcttgagtttcttctgtctgtgcctttattttcactaaatgtagttacctaaaaggattgargatctaatgccagtttcttagtccctctgtgagattatgttatgttgtttaatagatatatagtcatctctaattttgcttttggcttgtatttccctgatgactaataatgttaaacatcttttcatgtgtttattttgccatccctatgtcttcatcagtgaagtagcttttcaaattctgtgcccattttttgaaattgggtcatcttattattgagttgtaagaatcctttctggctcatgactgtaatcgcagcactttgggagtccgaggcaggtggatcaactgaggtagggagttcgaggccaacctgaccaacatggagaaaccccgtctctactaaaaacacaaaaattgcctgggtgtggtggcgcatgcctgtaatcccagctacttgggaggctgaggcgggagaatcgcttgaacccgggaggcggaggttgcagtgagccgagatcgcgccattgcactccagcctgggctacaagagtgcaactctgtctcaaaaaaaaaaaaaaagaattctttcatatattttggattcaaatccattatcagataggtgctgatttgcaaatattttcttcaagtctctggtttatctttttattctctgaacatgcctttcaaagagtaaaagttcttaattttgataaagtccagtttatcaatttttttcttttttctcttcttttcattcttttttttttttgagacagagttttgctcttgtcatccacgctggaatgcaatggtgcgatctcggctcgctgcagcctccgcctcccagcttcaagcgattctcctgactcagcctcccaagtagctgggactacaggcatgccccaccattcccagctaagttttgtatttttagtagagattgggtgtcgccatgttggccagggtgctcttgaactcctgacctcagatgatccacctgccttggcctctcaaagtgctgggattacaggcatgtgccaccacgcccggccttcttttctttctttccttttgttttcttcctttcatatagacagggtctcactgggtttcccaggctgatctcaaactcctggactcaaactgtgctcccagcttggtccagcaaagtgttgggaggcaaaagcaactgtgccaggcccattttttcctttattttttaaagatggggtttatctgtgttacccaggctggtcttgaactcctggcatcaagtgatcctctgacctcatccttccgagcagctgggactgcaagcacacatcacctcacctggctgaatttttttcttttatgattcatgtgtcctaagaaatcttttttgtttgtttgtttgttttttgttttttgaagcacagttgtgctcttgttgctcaggctggagtgcttggagtgcaatggcacgatctcggctcactacaacctccgcctcccaggttcaagcgattctcctgcctcagcctcccgagtagttgggattacaggcacgcaccaccgggcccagctaattttgtatttttagtagagatggggtttcaccgcgttggccaggctggtctcaaactcctgacctcaggtgatctgcccgcctggtctcccaaagtgctgggatcatagacgtgagccatcgtgcctggccaagaaatctttacctaacaaaggtcacaaagaattttttcctagaagttttatagtcttagctcttacatttagatctgttattcacttcgaattagattttcgtatatagtatgaataaagtccatttattcaacatatggatgtccattaactccagcactaataataaaaaagattatccttttcttgttgaatgatcttaggtttttttgtcaagaatcaagcacattcagtaggtctgtttctggactctgttgcatctctgtttattccagtgtcacaccatcttgattattatagctttatagtaagccttgaaattatgtagtaagagtcttctaactttgttcttctttttcaaaatcattttacataatctagatctgttatattctgatatgttttagaataagcttgctaatttctacaaacaagtttaatgggattttgattgtgattgtgttgaatttatagatcaacttggaaagaatcggcatcataatacatgtcttctcatacattttgttttactctggaatgtttttatgatttcctgcatataaattgtacatataatttgatttattcgtgtgttttatgtttcttttctttttttttttgagacagaatctcactctgtcacccagactggagtgcaatggtgcaatctcggctcactgcaacctctgcctcctgggttcaagagattctcctgcctcagcctcctgagtagctgggactacaggcacatgccaccacgcccggctaatttttgtatttttagtagagacagtgtttcaccatattggccaggctggtctcaaactcctgaccttgtgatccgcccgcctcgtcctcccaaagtgttgggattataggcgtgagccaccgcccccagccatgtttcttaatgctatagaaaattgtatttttttcagtttctaattgtttattgctagtacattgaaacataattgatttttctatattgaccttttatcccatgaccttgttaaagcttgcttattagttctagttgatctttgtggattctgtggaatattttatgtagcaaattgtgtagtctacaaatagagttagtcttatttcttcttcttgccttactgcaccagtgagggccttaggtgcaatgttgaatagaagtggtgagagcagatttccttgccttgatcttgatcttagggaacagcagtctttcaccaaaagtactttatacttacccttttatgacacttgtcacatttgtaatatttgcttggtcattgttctctgtttcatagaaacaagagtccttgygtgtatagttcagagtggtatatcttggaattcattatatatatgttgaatgaactaatccatgagagtatatttgaacaaaggctttcaggaaattgccttcatcagctgatcaaaattaacatcaccagtgagggtgaagtggacgttatgtgcctccagatgtaattgtctgaggatacaatatcacctatgtaatattccagctgagaatgtgtaagctgactctaataatggggaaacaaaagataaatccaaaatgagaaccattctattaaaatatcatatgaaaacaaaaaaagggctgtgaaaatcttccaggataagagataaagaaagtaaaacctaacatcataaaactcaagaaaatgtaggggatgctgggcctggtggctcatgcctgttatctcagcactgtgggaaactgaggcagtaggattgcttgagcccaggagtcctagatcagcctgggcaacatagtgaggccctgtctctacagaaaaaaaaaattaaaaaaaacagggaaaagtattagtgaccttgaattagtcagagttcttttagataggacacatgaagcacaaatccacttaaaaaattgatagacttggccgggcacggtggctcacacctgtaatcccagcactttgggaggccgaggcaggtggatcacaaggtcaggagattgagaccatcctggctaacacagtgaaaccctgtctctactaaaaatacaaaaaattagccgggcgtggtggcgagcgcctgtagtccccgctactcaggaggctgaggcaggagaatggcatgaacccgggaggcagaggttgcagtgagccgaaatcacgccactgcactccagcctgggtgacagagcaagactccttctcaaaaaaaaaaaaaaaaaaaaaaaaaaaattaatagacttcattaaaattaagaacttctgtactttgaaatatgctactaaaaaagtgaaaacgcaagccacagactgagagaaaaatatttgcaaaacatgtatctcagaaagaaccgatatccaaaatacatagaacatttcacacctcaataagaaaacaagcaaccctatttttaaaaaatgaacaaaagatttaagaagacgtttcatcagagattaaaacatagttgacaaacacatgaaacaatgcttaatatcgttgatcattagtggaattcaaaattaaaatcacagtgagcttgggcacagtggcccacacctgtaatctcagcactttgggaggccaaggcatggtagtggatgcctgtagtcccagctactcgagaggcatgagaatcgcttgaacctggatcacttgaaaccgggaggcggagcttgcagtgagccaagatcatgccactgcactccagcctgggcaatagagcgagactgtctcaaaaaaaaaaaaaaaagagagagacaatgataattaaatggaagacctgactctagatttgatccaggaaggagataaaatgccataaagtactttttttttttttttttttgagatggagtctcgctctgtcacccaggctagagtgcagtggcgcgatctcggctcactgcaagctccgcctcccgggttcacaccattcttctgcctcagcctcccgagtagctgggactacaggcgcccgccaccacgcccggctaattttttgtatttttagtagagatggggtttcaccgtgttatccaggatggtctcgatctcctgacctcgtgttccgccctcctcggcctcccaaagtgctgggattacaggcgtgagccactgcacccagccaaagtacattattgaatcagttgacagaattgaattacatacagtagattcgataaaagtattgtaggccgggcgtggtggctcacccctgtaatcccagcactttgggaggccaaggcgggtggattacgaggtcaagagattgagaccatcctggccaacgtggtgaaaccccgtctctactgaaaatacaaaaattagcccggcgtgatggcacgcacctgtagtcccagctactcgggaggctgaggcaggagaattgcttgaatctgggaggcggaggttgcagtgagccgagatcgcgccactgcactccagactgccagtagagcgagactcgtctcaaaaaagaaaaaaaaaattattgtattgatattaatgttactgagattgataactatactgtgactgtataatgtgatatccttattgttaggaaatacacactaaagtatttagggataaagggctatgatatacatgtaagttacccttaagatacccttaagtttctatcatactttgtgtatatatgtacatatgtacaaacgtacacagagcacacaagtagtaaagcaaagggataaaatgttgaccgtaggtatgtctgggtaaagggtataaagtgctttatatgttatttttatttttgcaatttatctgagaataaaatcatttcaaaaatttaagttattagcattccacttgtaatgtttttcatagaacttctggttcagaagttcttaactgtttgaatgtaacccttttcagctggaagaccttgattcacaagggaaatcatcttcagttgaattggatgatcaaaagaggcaaaatcttttcttagcagattagctttgtctattttctaccacaaatgctcttccttcccatcctccgcaactgtcaattaatgaaagctacatctgaacaggcttcccacctttttcaattcaagctacagtgggttcttaaatgctcratgagtgtcagaagcaaataatatactcagaagatgaaattttcacataaaatgaaagttttactaaggtatcttgcttcacttcgtcatcagatctgggagcacagatggtgtatttggaccagttaaaaacccctggagttattcaaaacaatatagagaaaagaggaagcagaatccccacagcgagaatgaagattcagactggctgataactggaggaagctcaggtgggagtgcagctgctgtatcggcgttcacatgctacgcgtaagatgcttttctctatctgtattttaaaacccacccaaatacaaacagtcataaactgtatccagcaatagagtagttcatatcctggtatttttctttctagtgagctatatgtgctcaaaggtatatcaaaattatatcttgagttgcactcaactgtacagtacactatgtatatttaatacttttaactttaaaataacaaatttttctccatagtatctggttctcttaaaatatgattttgtggatcttgcagaataaagcatcraacataaatgaacttcattgcatttcatttttaaataatttgagtgtgtgctcactgattatacaaatatttagggactaacatacaatggctttagttgagtgctgctgaactaaactgttggtaatgtttatccttcagcaagatcaatcttttgaaaaaaaagaaaaaatgctaatatgtattaataagatattttaaatagtgttttcaggaatctgcaattaaaaatgtacatcagtaagtaaagttttttcaagcttgttaggtgctgattctgtttatctatcatactttgtatttggtaagaatccattgatcatattttcagttccatttgtaaagcatttcttaactacccaaagaaaagaaagtaaatatggctgttgctgtgtttatcagtctcaatttaatcaaaatgaatgtgtttctttagtaatagttttgtattttatctccccttaattatccattaaaactaagttctttcacacacattgcaatccataaatcatttatatttttttagagctatggagatgtgagttctacagattttttttcagttttcctaaaatcttattaacaagtaaaaccatttcattttatctctgtgaaattttatagcattgtattaatattaatgtgagttctgacaagttaggactgcaggattaggtgctttttttctgtcctcatcatcccacttagtgttcatctttctgaatgtgcttttkagtagatggcattttgacacataattcctatggaaatgtaagttttacttttacatagccgtcagtgaatgctaataagaaaatgtatcttttaaaattgtgaaagcaacagtctgattttgtagcttaacttgacactgtaagaaaggaaatctaatttgcattttctgtagggcacaagtgccatgttattgttaggagcattgttcagtccaaagcttcactttaaatataagcaacagaagtacagaccaaaaataacttcagattgaatgtatctcaaactgtaaagtgttctgcttttgtttccttatttttgatttgtttacccctttttgatttgtttcttttacaatagcttttaaaataggaagattcctggagtactgtgcagccactaaaaagaataagttagagcactatgcaatgacatggaaaaataaccaagataaattgttaagtgaaaaataagttgcagaacccatttctgttaaaagtaacaattgcataggtatatatgtcagtcattgcatggaagtactgcatgtctggatgaatgcatgtcagaactggtaacggttattgtgggggctgtgattctaagagtaatcttactttatacatcatatagttatataatattttaatttttatagtagatatgtactgttctacagcacaacttctgttttcctgaaatggttttttaattgtggtaaaatgcacataacataaaatgtaccagcctaaccatttttaaaagtacagttcaaaagtattaaaaacatgcaatcagtcttcagaacacttttcatcttgcaacgctaaaactgtgtacccttcaaccctctcccagccctggtaaccaccttctactttgtgccttatgaatttgattactctagttatctcatgtacgtggtgtcatatagtatttgtctttctgtgactggcttatttcatttagcataatgtcctccaggtccgttttttgtttttttaaaataagaacaacacaaactctgtaggtaactgggtaaagaaatgaacagtcactttgtagttgagtaatgcatgtataaataagtgtgcaaaattatttaaaatgcacattaataaaaactttttggttatcacactaacaattttaaaaattactagtactcagtgacggtactgaaactttaaaacacaatctgactcactgcaactagggatataaattggcataatctttctgacaagtaatttgacagcatatatcagaaacttatgtgcactaagtctacttcttggaagctagcctaaaaagtactcacacataagcaaaaatttatgttcagagattttcataacaaagttatttattaaatagttattctagttagaaacaacgtaagagtttaaattattaaacatctcaatccatgattctaaatggggtgggtagcaaagggctgtatctgaatttctaggaggggcrtatttagtctgtaaaagcatactgcaaaattgccattaatttgatttgttttcaatatcaacatcagaagaaagtgyaagatttatatgtatattgaaaggagaatggactttaaaataccaggaatcacgaatttatatgatggaatattacatatactttacattttcaggaattttaatgacatagtaaaaagctaatgttaaaaaagggatggaaactcatgattacagaattatctcaacggtgaaaaaaatgcatttttaaaaagacttgaacttaatatgccaaaatgttaacagtgttttcctctgggtattggaatattgagtacctaaagttttctgtactttatgaattctctgagatgaacatgtgttacttttgtgtaatcagaggaaaatacagtttaaaaatatacaattgaaagggtagattccaaatataattagagatatatcattcttctaaagataattccatttaaattccagggctttaggatcagatacaggaggatcgaccagaaatcctgctgcccactgtgggcttgttggtttcaaaccaagctatggcttagtttcccgtcatggtctcattcccctggtgaattcgatggatgtgccaggaatcttaaccagatgtgtggatgatgcagcaattgtgttgggtatttatataattctatatcatttgcaacagcttctctataaaacaatatatctgtcattcataagtattgctccttacaggtgcactggccggacctgaccccagggactctaccacagtacatgaacctattartaaaccattcatgcttcccagtttggcagatgtgagcaaactatgtataggaattccaaaggtaactttttcctttcattactttayagaaatactgtcaagtccaatagagagcacagacttgggaggcggattgggtgggtttgaatctctgctctgccacttttattaatcatgtgagttgagtatgtgacttaatctcttttagctcaatttccccatctgtaaaataggaataataaaaatactgacttcagagaggtttgtgaggatcaattagacagtcatgttaagtctgtaaattgtttctgtaatgggcaagatagcaaatattttagattttgtggaccatgcagtctttatcataactgcttaactgccattatagtgagaaagcagccacagacaatatgtaaatgaaaaagtgtgtctctgttccaataaaactttattttcaaaaaccagctggcttgtcacatctggcctatgggccatagtttgcccatccctaatgtaaagaaaggactttagcccaaagccacaacttgcatagtaatgcctcaaaaaatgttaacatctttactgttattattattactactgcatctattacagtagcaattgagtaatgaatacatgaatgttataatgttaaattactaaccttttaaaaatattaagcattgcaatatattaatactttaaatcttttaggaagataagttaccctgcagaataatgaagtttcacaacctcagcactgttggtgtttggggctggtaattgtttgttgtgggagactgtcctgtgcattgtaagatgtttagtagcatccctggcctctacccctacatgcaagtagtaccscaccaccaaaaccacaatcccacaaccaaaaatgtctgcagacattgtcaagtgtctcctggttagggaaaaggagacaaaagtaacccccaggtaagaccactgctatagagaaatactaccttatttaaaatcttccattaaggtaatatatgtaaggccaggtgcgtacacctgtaatcccagcaccttgggaagccaaggcaggaggatcgcttgagatcaggagtttgagaccagcctgggcaacatacagagccctatgtctacaaaaagttttaaaaaaattgtggggtgtggtggtgtgcacctgtggtcctagctgtttgggaggctgaggggggaggattgcttgagtccaggaggttgagactgccgtgagccatgattgcaccactgcactccaccctaggtgacagagcaagaccctatctcaaaaaaaaaaaaaaaaaaagaaggcaatatctgtgcattctttttaagcatttatttatagagagcataggctttaaaacagacccagtttgaaatcctagaccctctacttacctgctatttaacattaggaaaataacttcttatgtcaagatttttcattaacaaaatgaaggattataatacctacatcacaggcttgttaaaagcatgagatgagagagaatctttgaaaatcatctaacaggctgggcacggtggctcacgcctgtaatcccagcactttgggaggccgaggcgggcagatcacgaggtcaggagatcgagaccatcctaacacagtgaaaccccgtctctactaaaaaaaatacaaaaaattagccgggcgtggctgtgggtgcctgtagtcccagctactcggaaggctaaggcaggagaatggcgtgaacccaggaggcggagcctgcagtgagctgagattgcgccactgcactccagcctgggcgacagagtgagactccgtctcaaaaaaaaaaaaaagaaaatcatctaacagggtacctgatacatgagcatttaacatatatgctgatatatgctgatatgctgttaggttcctgatacataatgagcatttaacaaatattttccccaaccagatctccaatctttaatgttgttatatccagatcatratatctagtactgtgctttgtcataccataaacactctgaaatggatttagtctttctagctacctaccagcaattttatcctattttctaatgtattaccaaaggtcctgaagtacagatttttataaaatcatctatacagatgaagtacaaatttttataaaataatctatacagttccaattttgtatcttgactttttgctrtaaggaatatcttgtaccggaattatcaagtgaagtacagtctctttggtccaaagctgctgacctctttgagtctgagggggccaaagtaattgaagtatcccttcctcacaccagttattcaattgtctgctaccatgtattgtgcacatcagaagtggcatcgaatatggcaagatttgatgggctacaatatggtaagatggctgggttattttatttttaaggtagttgtcgcaaacatttgaaaagttcacttattagtgacaaaaaagttaatgcttgagataatgttagtgattcagaaaagttcatcagtgaatcattttacctttgtcattttagacttgtacttacactatttgtcataaatatttgtgtatgtttggtttgcttctcaggactgtgaataactcgaagggatagtatcttgttgtcatatgctcagtcccgctaatgtagagctcaataaatgtttgaatgaatgaatgagggagtgaacaattggagtttctttcttggttcttttcttttcttctctctccatgaccagtccatcagtcaaaaggcagatggggaaaagaaaccattaagggcaactccctaaactttagtattggtgacaaaaatgtgaatctaaataagccaggcatggtggcgcatacctgtaatctaagctactcaggaggccgaggcaggagaatcacttgacaagggaggcagaacttgcagtgagccgagattacaccactgcactccagcctaggtgacagagtgagactccatctcaaaaaaaaaaaaaaaaaaagtgaatctaggcctgattttagccaaaactttactgactttacttcctttcaagtaatgtttacccttttcttgttttcaggtcacagatgtgacattgatgtgtccactgaagccatgtatgctgcaaccagacgagaagggtttaatgatgtggtgagaggaagaattctctcaggaaactttttcttattaaaagagtaagacaactcatttaggaattttcttcattcttgaaacctcaagtaacatgtctcttatcaggtcttataagtcaaggtatttagtaaagaaacaaaatctttatgatttgaattagaaaagacctgtttatggcacttttgggtcctggtattcaaaaacaaaagaaatgttggtactttagctaaatgattggtacagattacaggcagtcctccatatctgtgggttttgcaaccttggattcaaccaaacacaaatcaaaaatattcaaaaaataaaaaataacacccaacaataaaaagtaatacaaattaaaaagcaatacagtgtaacaactatttacctcgcatttacattgtattagatgttacaagtaatctagggataattttaaacgtgcaggaggtgtgcataggttttatgcaaatactacaccattttatatgagacttgaatatcctcagattttggtatccacaggggtcttggtaccaaacccccaacggacaccaaggaatgaatgtaagtaggaagccattaaggattttaatctcattaaatgtcctttgggtattaccacattggtttattgctgttagagccttaagcagagagttgtattgtctcttgaaaaatgtattgaatcaacttagtttttccttgtattatgtatgtctttactctaaaaaagaattcagaatgactatgactcctccttcaattgtcttcattatgagtttattcacgatcttgtgaacaggcytcatcttctataccaccaagtgtgtctaagaggacatgagaagtgtgaaaaagcaagattggttattgtaatgaagagcttcttggagtttttctccatgccctcaagggcagaaggcattttattcatctgcgtatcctctcagggccgatagttagaattactttttatttttgagacagggtctcactctgtcacccaggctgtagtgcagtgaagtgatcgcagctcaccgcagccttgacctcttgagcttaagtgatcctcccacctcagcctccctagtagctggaactacaagcttgcaccaccatgcccagctaatttttgtattttctgtagagacgggatcctgccatgttgcccaggctgatctccaactcctgggtycgagcaatccacccatctcaacctccaaagtgcaggtgttacaggcatgagccaccatgccaggccacaggattactttttctaagaatactatttgaggccgggcccagtggctcatgcctgtaatcctagcactttggaaggccgaggtgggcagatcacctgaggttaggagttcgagaccagctggccaacatgatgaaagcctgtctctactaaaaatacaaaaattagctgggcgtggtggtgggcacctgyaatcccagcaactcgagagactgaggcaggagaatcacttgaacccgggaggcagaggttgcagtgagccaagatcgtgccactgcactctagcctgggcaacagagtgaaactccatctcaaaaaaaaaaaaagaatactatttggttatgttccagattaaaagactgttaccatattgaccagatgcttgtaatgactttggagtaggaaaacaaaaggaaataattttctaagtgaaaacatttattaagctaaagatattacttttgccaaatattactgattagaaccatattgtttatctcagggcacaagttgatgaattatataggtcaatgtaacagcataaaaagaaattgaaggagagaagtcagaaagcattcctcatgatcaccatttgggggttctgataaaaggaagttaaaattactgctggtatccctagctcctgagtcagtgccaagttgggtcaacttgggtagacaaaagtgataggaaaaatgggattcggaatactttttttattttaaaaagtcaacttatgtgccaggaagagtttatttatttatttttgagacagagtctcactctgtcacccaggctggagtgcaatggcacgatctcagctcactgcaaccctgcctcctgggttcaagcaattcttctgcctcagcatcctgagtagctgggactacaggcacacgccaccacacacagctaatttttgtatttttagtagagatggggtttcaccatattggccaggctggtctcaaactcctgacctcgtgatccgcccacctcagcctcccaaagtgctgggattacaggcgtgagccaccatgcccagccaggaagagtttatttttaattgacataaatatttacttatgtaacacatttatatctaccttttgctatttatcttctgtttgtcccatctgttcttttttcttttaaccttttcttctgcttttttttctttaaatagtaatttttctcttaaaaagatctaaaatgagaaaaatagtgtcatttatatttacctacatatttagtatttctggtgcttttctctctgctctagagatataaatttccatctggtataattttgtttttacttgaagaactttctttaatatttcttgtagtcctgttggcagtgaattctttcagctttggtttatatgtagaactctttattttgcttttaattttgaaagatattttctctgggtttaaaaatgtaggttaagctgggcacagggtacactcctgtagttacagctactcaggaggctgaggtgggaggattgcttgagcccaggagtgagagcctgcactgagctataatcgcaccgctgcacttaagcctgagcgacagagcgagagcccatctctttaaaaaaaaaaagtataggttgcttcttctttctgtactttaaaggttttgtccattgtcttctggcttacatagtttctgagaagtctgttgtcattcttatggtcattcctctgtatatgatgtatctttttttcctctgattttaagattttctttttatcattggttttcaggaatttgactgtgatgtgccttggtgtggttctctgcatatttcttcttctgcataggggtttgttaagcagctttgatctgttgggttatagttttaatcaaatttggaacattttggctattatttcctcaaatattttttctgtcctccatctgtctgggactctcttcacatgtatattaatctgcctgatgttgtcccacagctcacagacactacattctttttttttcccccagtcttttttccttctctgcttccttttggctagtttccattactgttttcagaatcactgatctttttttctgttatgttgattctttccagtacattttttatacattatatttttttctctagaagttccatgtaggtcttcttatcccttcaatttcttcattattttatattttcttctaccttcttgaacatatrgaacatatttaggctgcgtgcggtggctcacacctgtaatcccagcactttgggaggccaaggcrggtggataacttgaggtcaggagttcgagaccagcctggccaacatgacaagaccctgtctctactaaaaatacaaaamttagctgggtgggaaggcgtatgcctgtaattccagctactcgggaggccaaggtacaagaatcacttgaacctgggaggcagaggttgcagtaacccaagattgtgccactgcaccccagcctgggtgacggagtgagactctgtctccaaaaaaaaaaaaaaacatatttatagtaactgttttaatgttcttatctactcagtattccatcatttttgcatctgtgtgtattaatgctttttccctctctggttatgggtcatattttttgctgcttttcatgtctgtatattgtgaattttacattgtcatttgctagacttttgttatattcctttaaacagtgttgggctttttcccaggatgcaataaaggtgcttggaatttgttggctcttttcaaggcttcttttaaagctttgttaagataaatccaaagcagcctttattccagggctaattttactttactttgaggtgatgctttgatgctgcatatatttgagtctttcgctttggctgttcgaaacacaaacttatttccgtccctgtttgagctctaggaattgttcagtccactgctctttggggattgtttccccagccttgggaatttcttctcatgcactcatagatcagtactcagccagagactcaaggaatctccctgcagatctgttgagctctctctttgtgccactcccttctattcagcaccctgctttgcaaattctagctgcctttgcctccttgaacttcagatctctgtccctttaacttaccccccaccccacatactgtttagcttcctctctggaatgaggcctgaaaactgcccctaggcattaagctggggaaatcaaagggcatatctcattttcttttcttttctttttttggagacagggcctcacttggtcacccaagccggagtgcattggcatgaccatggctcactggcagcctcgacctcccaggctcaagctcttctcagcaaccctcaacactccccaccccccccgtgaagctaggactactgtagttttttttgtagagacaggatctccctgtgttgcccaggctggtctcaagctcctgggctcaaggaatcctacccccagccaccccacaggcatgagggaccacacctggcctggcttacttcatttgtttctcttctctcacaactttttctcctgaatgtctgttgcctaatgcctgaaaatggtcatttcatatattttgtccagttttctagttgtttaagaaggcagagtgtcttagttctttttttttttttaatcccctattctgagaagcagtcttagttcatttttgctgctataacagaatgcctgagactgggtgatttataatgaacggagatttactggctcacagttctggaggctgggtgggaggtccaacattgagaagccagcacctggtgagggccttcttgctatgtccacacatggcagaaagcaagggtggggagaaaaagagggagagaaagggaaagcacatggggggctgaactttccctcttagaatggcaccaatcccactcaagagtggagttgttatggcccaatcacctcttaaaggccccatctcttaatactgtttcagtggcagttaaatttcagcatgagttttggaggggacaagcattcaaaccatagcacagggtaaatcccatctccattactctatcttggatggaagcagttcttcttctgagccatatttaaagtaggaagaaatttaatagaaaacaagtatttgttttgttttgttttgttttkttttgagacggagtcttgctctgtcgccaggctggagtgcagtggcgcgatcttggctcactgcatcctccacctcctgggttcaagagattctcctcctgcctcagcctccccagtagctgggactacaggcgcccaccaccatgcccggctaaatttttttgtatttttagtagagtcaggatttcaccatgttggtcaagctggtctcgaactcctgaccttgtgatccgacgcctcggcctcccaaagtgctgagattacagcatgagccaccaggcccagccagtatttgttctttataaaattcaggttttggaatatggtgtttaaaccacttaggtgttgtcagtgtgtaaattatatgtgatgcctgcattggtctctctgtagacctggwggtcaaataagagtaaggacctatgatatttctgtaccactcttttagagtaaaacatatttcacgtttttatcgtattttatttggccctcagtaaaactggagcaggtatatccatttttactgttgtggaaactgttgtggaaaagaatggttagttctttttttttttttttttttttttttttttttttttgagacggagttccgctcttgtttccagctctccacgctggagtgcaatggagcgatcccagctcactacarcctccgcctcccaggttcaagcaatgctcctgcctcagcctcctgagtagctgggattacaggcatgagccaccacgcccggctaatttggyatttttagtagagatggggtttctccatgttggtcaggctggtcttaaactctcagccgcaggtgatccacccacctcggcctcccaaagtgctgggattacaggcgtgagccactgcgcccggcctagaacagttcttgctagcctctcctaacagcttcagaagaatctaaaggattttttttccttttctttgtatcattgatttatggttactcctatgtctggctttttctttagtctttttagtaaaataagcatttttgaatttcacatttctacccctgggctatacctatccgtaaaatacaaaattcaaatactgcatagtctaccgctgtctatcttagtaacctttagaaagccatttgttgctgtgtactttactttcctcaccaatgaatattctggtttaatgatggccctggagttattaatattttgagattataagtgtagaattgcatctactagtgaattctgaattcggattgattaatttatatatacaaacttttagagtggcaacacagtggaagagaattcatttttatgttaagaatcttaatggtgcctcctcataaaagccaagaatccagtggttctttttttttttttttccctaaacaatgcctaaactctttatttaaccaaccagtatttctggttttcttcctgatgcaggattttaaaaccttagaagtctataaatactgcattcagactttccacatcaagagaaaggggcccagggcagaagatgtcaggccccaggctgttttggggtgggaaaagtggcaaagatttctcaacagtctgtttcagttttctaacttaattgaaatgcctttaagctctgcttcatccccaaactttcccctatggcgtctatgatagaaaaacactcctctctcatatacgccccaccactggggagccagggggaagggaatgggcattacacaggcaagccaaactttttattcagccagaaaatggaaatccaatggttctttatcaagcctaatgtaagataattgattaaaagaaaaatacaaaaaatccttaaaaacatcacctacttttttcccacagaaactatgaaaattattttgtcaaagcacagaaagtgagacgcctcattgctaatgactttgtaaatgcttttaactctggagtagatgtcttgctaactcccaccaccttgagtgaggcagtaccatacttggagttcatcaaagaggacaacagaacccgaagtgcccaggatgatatttttacacaagctgtaaatatggcaggtgaggattcctcaggaacattctgattttcttcaaattcttaggcaggtaccctggtcttcaacttaagattctagctagatggtttccgaaaagcaaaagtctatccttttggaatgcttaggagtgagtgtgtgtgtacatgtattagtctgttctcacactgctataaagaaatacctgagactggataatttaatttaaaaaagaggtttaattggctcacagttctgcgggctgtacaggaagctgagcagcttccacttctgcgaatgcctcaggaaacttaaattcacagtggaaggtgaaggagaagtagccatgtcttacatggcccagcccaagcaagagagaaagggggaaggtgctacacacttttaaaacaaccaggtcttgtgataactcactcactatcacgagaacagcaccaaggggaatggtgttaaaccgtttatgagaaaccgtccccatgatccagttgccttccactaggccccaccttcaacattggggattacaattcaacatgagatttgtgtggggagacagatccaaaccatatccgtacacttgcatgcactctcaccacacacacacaaacacaacacacttagtagttttttttaacttttattttgaaaaattttaaacccacagaaaagctgaaaaagtggtataatgaatgctgatatgcccttcacctggatgtaatcttgttaacattatatttgctttgcccttctcttcctctttctacacacccacactcaccacacaaacaactttgtttttacctgaatcatttgaaagtttcagatgtcatgacacttcacccctaaattcttttgtacaaatcttataaggataaattttcctacagaaccacaattccattgtcatacctaagaaaactaacatgattgaagaataatttaaatatggtttatattcaaattttctcagttctaccaaaagtgtcttttataagttgtctttcctcctgatatattacattggtttatggtatctttttaaaatctagaacaatcaccccacctctcttttttctttaaaaccacatcaggctatgctataatttttgtttcaatcatcaaacataatgtagaaaacttaagaggaaaaggaaagtctattacatttacctatacttttgcttactgtgttcattcttccttcctgaagtaccaagattctttattttgtcacttctgtttagagaaatttctttagcctttcttttagggtaggtctgctgatgaaaaattatcatagctttccttttgagaatgtgttgatttccctttgatttttaaaggttatttttgctggatgtagaactctggttcaacagttcttatctttagcacttaaaaaatgttaakagcccagtccacttgtgctgtaagatgtcccatccataatcaggatttgtcagattgcttcctcatgattgggttgagttaaacatttttggtagaagtactacataatcttcatgtcaggaaacagttaatatcagtttgtctcacttttggaaaccaagttgatcacttcgctaaggaagtaactgctagatgtttccttataaaaaggtacatttttccttttatcatttttttaagcaatttctggagtaatattttgagaccatgtgaatatcctattttccaattatcttgaacccagttttagcattcattgatcatccttgaaatattagctagagaattacaaaattctggctttactaaatctgtcattccttctacatttattagctagcagtattctctaaagaagagccttcctttttttctttaattcaatgtattataagcaattactgtcagtattgtttttgatggtcaaattgccttaaatttggccaataagagccccttcaagttatatgtatcctttaaaactgtccccattttaatttttgaaaacttgttttattgtataacaagatggtctgggattttgtactttctctgcccaaacctggaattaaaactaccctgagctaatttctcatctaatggattgccaaaaattcaaaaactgaacaacacactctgtctgcaaggctataggtggaagttcaaaatggtacaacttctttgcaggggaattttgcaatatctaattacatatgcatttgtcgtttgatgaagcaatctcctcctcatctaagaagatttcaagaataccaaaaaaatacatacacaaagtaattctctggggcattgtataaaatagctaaatattgaaaacaatctaaatacccaaccacagaagactggtttactcaattatggkaaaaccaagtaatggagtactatacagcaataagaaatgaatgaagaaggtttctgtgaactgatacagaatgatttccaagatatattgttaagtaaacaaaacrtagtacaaaagcattatatagcataatatttttggttgttttttaaaccttatcctgtattgtacttattagcactggaaagtggaagaggtctctgctaattagggtggagaattaatcacctactgggtttccttcttttcccaggattgccagcagtgagtatccctgttgcactctcaaaccaagggttgccaataggactrcagtttattggacgtgcgttttgtgaccagcagcttcttacagtagccaaatggtttgaaaaacaagtacagtttcctgttattcaacttcaagaactcatggatgattgttcagcagtccttgaaaatgaaaagttagcctctgtctctctaaaacagtaaacatatcttacaaattaaaatgacttttaggctgggtgcagtggctcacacctgtaatcccagcactttgggaggscaaggcgagyggawcatgaggtcagaagatctagaacagcctggtcaacatggtgaaaccccgtctctactaaaaatacaaaaattagccaggcttagtggcgggcatctgtagtcccagctactcaggaggctgaggcaggagaatcacttgaaccctggaggtggaggttgcagtgagccgagatcatgccactgcactgcactccagcctgggtgacaaagcaagactgtgtctcaaaataaataaataaaataaaataaaatgacgtacagagattctatattctagagagtcaaatggtcttgctcaattcttgtaattaggttcttgttaatagtcattccatggaattactttttaaaattcctgtgacaattaataataaataacgtgtcagcatttrgtaagcatccactaagtgtacaatacttctacaataacacaagatacctgttcctcaaagacaatgcattctgccataatgttcattaaagagtttacagtaaaaataagattagggataaacttctcaaaaattgtacatctgtgtaactaaagcactaacaaaaacatgaatagtccttctagaggtaacttggatagcctaggcaggcaacttatcatgtggtgaaggccgcctcaggggttgttaaaaatgcacagaaacaattgagtgcgattattggcttctgagcgctgagcagagcaggtggaagaggaactttgagcacaggaggaaatgcaaccagtcagggcccagaatcatgcaaatctcaggggtatgcctctctggggaggagctccacttgcagggactccttttatttccctaagaaagagctgaaatgactgagaactttcctttcctccttagagttacaattttacttctgctattccggagcccatgcctagaagccagaacaactccatgttacactgagttcatgctcctatttactgatcacaaatgagctcattaatgtcatcgaaacatttattgtaacctaacagaccatcacagattggaaacttggtagatagcagagcatggtattagtgaaaaaggttcaaaatacacaagtaacatacactctgaaaaacatgcagataatttgctgatgaagcagaagaggggatgcgcatggcaagaacttgccttaccccagattctctatatctcatggtttccttttcctcttgactgtctttacgagtgttttttatttgggaccctcgagcccagagatattaatggatatctgtattcaatatttgacaaaatctaatggaaaccatccatttactcatgataaggcttcatcactggatttctgtgtcttcactagaacaccattgtcatctcatattgatcaggtattttaatctagcacttacatattgttgataaatgaaagctgaattgttacttaatgaattcactttgtttagtaaaaaaaaattgttttctaaatatgacgttcatgaagagaaaataatgagtcagaatcatctgcagaaccactggaatgtttcatcgtcacctgttagttttcataaacagttttctgtcctctctgagatcctcccgctcccaaatactcaacctgattaacttcacataaaagtcttatgtgccaggcttagtaatattcctatagattttgactctgaatccctgaaagaggaagaaatccatgagagaaaattgcattactttatagcaagaggaaaccgttttaagttttttaattgctcagacaccacaacatcctagatggaggaaaccattttagttgaaggagcaaatatgatgtcaaaagcaagtaaataaacaaaccgttgccccaatctgtttttatgtaatgaatttaaaaaaaaagagagagagagagagatgggctctccctgtgttgcccaggctagtctcaaactcctgggctcaagtgatctgcctccctcagcctcccaaagtgctgagattaaagacgtgagccaccacacctggccgaaataataatattcaatattatatattcaatgatattattcagtattcaatattatttcaaataatattaaatctcttgttcctgtatctctacatgagctgcactaataatttgaatctggaaattaaaaagtgaaacatttaccgttctcatatactgatacccaactaccatgaaatgatacctaatttgtttttcttttctcttcatttttactcttaatctagtaggtctcattttgccaagtcactgtctgggaatttaagtggcaaatactttctttgtctcagctaattaaactctaaaattattagcaacagaacttccagaacagagtgtttttgaaaggtgaagatgtctacacgtgtaagatgagttccttgataacacctgaaagacccaaaccaaagcaaaagtttgaacacgtgtcagagtgaaaaaatgatgtgatcataaaacatggtgccctgccaccacagagagccaaaggagcaagcgggaaaaccactgttccacgctggcccacacttagcgttaccaaaaaaagcacctgaaacccaggaggcagaatgttccctttgagtggctgacaccgggtcctctgtgatgacatcagactgggctgtttaaaattaaagatggcatggtatagaagaggagcttgcaaaatgacaaaaaaaagtgcttattcctattaggaaatagctgcacctcctaatgtaaataagtaactttaggattttaaacagaatctgaaggatagtgaaaagaaataagcaggtactaataagtagacctcgggattcagcaagccgtgtgccataccttatttgattcaaagcaggggagtaggccaggcgcggtggctcacgcctgtaatcccagcacttacggaggccgaggcgggcggatcacgaggtcaggaaatcgagaccatcctggctaacatggtgaaaccccatctctactaaaaatacaaaaaattagccaggcgcggtggcaggcgcctgtagtctcagctactcaggaggttgaggcaggataatggcatgaacctgggaggcagagcttgcagtgagccgagagtgcaccactgcactccagcctgggcgacagagtgagactccatctcaaaaaattaaaaaataaataataaataaaaagcaggggagtaaaataatggaactttaaaaatatctcttattataaattttcattcattaactacttttaatccccctcccttttattattattatttttttttttttttttttttgagacagggtcttgccctcaccctggctggagtacagtggcacagtcctgctcactgcagccttgacctcctgggtccaggcaatcctcccacctcagtctcccaagtgtggcaccaccaggcccagctaatttttttaattttttgtagagtcagggtcctgccatgttgcccaggctggtcctgaactcctgggcgcaagccatctgcccaccttggcctctcgaagtgctgggatgacaggagtgagccaccgtgcccagtccccctccctttcttcaaacatctggttatctgtaccaaggcacaagcctaggaaaagacatatccgttgtgtttagaaggacccagaggaagtttaaaatagaaggctttcctcagttatttaataacttaagcaatgtgtacactagaacataaacctgaaaatttaataaaggcaaataacacgaaaaaaaaaccaaaggcaacattaagtaaaagtaattactacaggatttcggaggagcttttttatttatttttctttgtacctcaatagaatataaacccaaaaatattttaggcagtttattaaaaatatattattacaattgtataaaagtaaatagttgaggaaatccatgaagtgataataaaagtgaggaagaagaataaaaccagaaatagattaaaaacaaaaaatgcttgtcagggtatctatatagatgcttaatattgggtagtatatgatatggtgggaaattagctttcctagtggggtaaggccaccagatttaaaaatcagacaaccctgaattgaatcttgttgctgccatttccgagccgcgtaacttgtcttgagtttcagtatcctgacctgtaaaatagggataatatccactccttggggtagtcggagggattaaatttaagtgacacactgaaagcacatagcatgatacctgacagaataagcacgcaatattttgtagctataaataaatgcatgcaatcatgaatttcagtcattttcttatagaggcctcacagtaaactcttacagacgccacaatttggcatgtggccaaattataatttactgaaagcttataccagagaccagctatatatttccctgatgatctggcctcccctgagaatgaagtttaaaatatctggaagaactgatagactacattttttttttttttttatggagtcttactctgttgccaggctggagtgcagtggcggcaatctcggctaactgcaacctccgcctcccgggttcaagcagttctcctgcctcggcctccgagtagctgggactacaggcacgcgccaccacgcccagctaatttttgtatatttggtagagacggggtttcaccatgttggccaggatggtctcaatctcctgacgtcgtgatccgcccgcctcggcctcctaaagtgctgggattacagccatgcgccaccggcgcccggccactagactacgtatttaaacagcaatttccagaggcttggcgaggtggctcatgcccataatcccagcactttggaaggccgaagtgggtggatcacttgagtccaggagtttgagaccagcctgggcaacatggtgaaaccccgtctctactaaaaatacagaaaatgagctgggcgtggtggtgcacgtgtgtaatcaagatcgcttgagcctgggaggtggaggttacaatgagccgtgatcgcaccactgcacctcagcctgagcaaaaaagtgagaccttgtctcaaaaaaattaaaataagcaatttccatgagtttttgataaagaattggccattccagtgatagaaaacctgaaagtcttcgtgacgtgtgaaccaaatgaagaacagggctgacaggcgttttaaagaatggaggttccgggccgggcgcggtggctcacgcctgtattcccagcattttgggaggccaaggcgggcggatcacgaggtcaggagatcgagaccatcctgtctaacacggtgaaaccccgtgtctactaaaaatacaaaaaattagcctggcgtggtggcgggckcctgaggcaggagaatggcatgaatccgggagacggagcttgcagtgagccgggatcgcgccactgcactccagcctgggcgacagagcgagactccaatctcaaacaaacaaacaaacaaacaaacaaaaagaatgaaggttcccccaaaatggtcaacccatattcctatggggaaagtgtttttgacagaaccaaattcttcctcataaaaagcagttccattctaacatatagacataatcgaggctccaaaataactgtatcttcagtgcaattcctttaacatgggaaaattttaaggtaaatgttaccagcagccaattagtacattcctcagggaaaataagttaacgaaggacccatgagtcatctaattgtaagcaacttcactccttggtgaatcttccataataagttagttgcaaaatgggcctgcaggtcaatgaataatatgataaagttggtggcagatatctgccaaaattataatcggcaattttaccatagttcacttagcagggccaattgtctatagaggccagtcatagtttagaatacttatctttctgttatctatgatgggggcatatacatctaaattatccaaaactgctttcaagtaattaacataccaactaaaaggaagtgaggctggaattcagagtttgaagacttagaataaccaaggatattctaattctaatacggtgctctatcagaacagttctatagacaagcatgtaagaaaaaaatctattttttttcaaattatgtgcaaattatcttcttagcgatagcacttcatttctccgtggaaatggccacttggatgccaggtaattggtgcagaattaaggtggtgctaatggtaaaagaagtgaagcactagaaagtgaaaattagaagaatgtagaccttaattggattagaggataggggagaatggagggaaagaaaagttatttttatcctatgaaatgttcgcagctggaagaatggtattaccattcacattaaataaaaagggaaagcaacaataatttgtagggactggagaattctacagccaaatgagaggcctaacaggcaggggaaaaagaggcaattaagtaagatggcgttttgggagtcagagcataaataatgaagtctttatatttgtttcctttttttctgatgttttattattttattattctgcaccaattacctggtatcctagtggccatttccacggagaaatgaagcgttaccactaagaagataatttgcacataattttagaagaaatagatttttcttacatgcttgtctatagaattgttttgatagagtactgtattagaattagaatatccttcattattctaagtcttcaaacttaattccagcctcacttccttttagtttgtatgttaatgacttgaaaccagttttggataatttagatgtatatacccctatcatgcatatatacagcagtgaacacccacatacccaccacctattttaacaggttttatttttctaattacaaaggtaatgcatgttctctgtaagaaaaagaaaagcactataagagaaaaaaaatcacttgtcacctcaccatctagtatgtatattgttaaaaactttagacaaaataaatatgttggagttcatctaagcaaaaaatgattcatgaatcaagagcatttggagccagaagaggttctgagaactctaagtagtagcatgagcagtgagcttttataggctgaatacagaagcaaagtagagaaatcatctgattggctacagctagatgttttccttattggggcgtcatatgatgagccatttgccttatttgggtatggtctggtgagaggtccctaaccatataaccagttggttggttggctgtttgtgattggctgaggctttttttttttttttttttttttgaggctgagttttgcctcttgtcgcccaggctggagtgcagtggcgcgatcttggctcaccacaacctctacctcctgggttcaagagattctcctgcctcagcctcccgagtagctgggactacaggcacctgccaccacgcccagctaatttttgtatttttggcagagatagggtttcaccatgttggccaggctggtcttgaactcctgacctgagatgatccacccaccttggcctctcaaagtgctgggattacaggcgtaagccaccgcgtgtggcctttttttattatttatttaaattaaataagttacaaaaaatgtttgcaagttaagtccctgtgtgcttatttaagagctctgggtacagaagcaatcccatgaaaatagcttcctgcttgttttgcttaaataatttgtatatgcttatgtaattatatgtattttattaa

SEQ ID NO: 96148 - DNA, 69819 bp, Homo sapiens
ctttaacacagtccattcatgcttttgccttcttgcttcttgaaactgcgtatcaagatcaccagcaagctccacatagctaaacccactggtcagcaccagccctcattttatagtactccttagtagcattcaacacaagtgaccactccctccttgaaacacttcttctctgtgttcaggacaccatgccatcctggttttcctcctgtctcactgggcattctttcaagtctcttttgctggctttacttcctattgttgacctccaaaatgttggaattttaggtcttcttctatttttacactcaacttcccaggtaatctcatctggccctatagctttaattatcttctacactctggccaatgtatatcctcttacctagcctcttttctgagctctgaactcttgtatctagttgcttaactgatatcttcacttggatatctaggaggcatctaaaaattaacacatccagaacaaaactcttgataaccttccccttccaaacatgttccctttaaggttttcccatcttgatgtcacatttccccaactgccctagcccaaaacctaagtatcctccttgattcttctcttttcctcaaaccccatatccaaaacatctgcaaaccctgacttaaaaaacaatatccactcccattatctcgccaatgcaacaggcttctaattggtcttcatgctttcttgctttttttttttgagacagggccttgctctgttgccaaacctggagtgcacggatgtgatctcgcctcactgcagcctcaacctccgaggctcaagtgatcctcccacctcagcctcctgagcagctgggactaaaggcatgcaccaccatgcccagctaatttttgtattttttgtaaagacagggttcgccacattgcctaggctggtcttgaactcctgagctcagacaatcagcctgcctcagcttccgaaagtgttgggtttaaaggcgtgagccattgcacccggtcagtctttgtgctttattacttgcttttctaaagatcatggtcccttaagagtcatctgaaggagcttttaaaattttaactcagatcatgtccacagattcaaaactttccagaagattcccattacacttggaataaaatccatactccctactgtggcctcaaaggttctccacaatttggctcctacctgtctccctaacctcttctctcattgctctcctcattcacttctctccaggcatattggcccttttgctattccttgaacatgttaagcttgctcttgttttagggtctttgtacttactgttccatctgcctggaacactattctctcagatctgcccagtgttcccccttcatgcccttctggtctctattaagtattattcactcaatcagagaaatcttccctgaccactctagctaaaatgtccagctcccccaactagttctcatactatgatctacttaatttttctccatagtactcatactacctgaaattatatcatttacttttttttttttttaaagtgtttaatggctgcgtttccacacaaaaaagttaggtttcaggaagcaggagcttctgtccgtctttaatgctaccccccagtacttggaacacagaggtactcactaaatgttagttgaatgaataacagttgtttaaaatttagaatcgatttccctatagaacaatgattagtttttctaaagttgaagctccaagaagccaaatgaatatatcattctttaaactttaggattaataatattagcctggtgcctcactcctagaaacactgggatcatgccacaaaagacaaaggtaaaagtgagatttcctccccctttctgaatgtacttgggtaaaatttacaaatgggaattttacctatttggcattttacctcctttttgtgcctattcccaggactcctgttaccataagcttccactcacatcccccaaattgctgccatcatttccagcccttctccctaattccccgcaaatttccccctcttcaactgattatctcaattaaggtattatgaagaaatttgaactgttataatttacaacaatgggtggaaaaattgttcaaccttcccaggcatctgtacatatttaaaagagaattaaattaaaagataatttgtatgaattaattaatctctaattggtagaatttagggcaacagtacagtgatgtggaaaaaatacaaagtagacagaaggtagttttagagctggggaaataaccaccaaatattttgcatgctaggcattaatcagtatttgttaaaggagtgataaagtaaaagcaatcatgccaaggcaacctctggattttcccctgggtcagctctcctaaatagttcttttctccccccatgcggcaaaagttgtttttcacaatggctaactcaatgacaccagagagaagtagcactaaaaaaggtagcacttaaggagctatgacagttgtcaaaatcaaaatagagtgacttgtgttaaaatcctgacaaatggagccaaggaaggtcaagaagagagggttctcacgcatgaatgcctgataagaagaactatcacactccagctgacaagggattgataaccgaagtatataaggagttcaaacaactcaacaggaaaaaatccaataatcaaattaaaaatgggcaaaagattggaatagacatttctcaaaagaaagacatataaatggcaaactggtatatgaaaatgtgctcaacatcactgatcatcagagaattgcaaatcaaaactacaatgagatatcatctcactccagttaaaatagcttctatccaaaagacaggcaataatgaatgctggtgaggatggagaaaagttggatgaaatgtaaattactacagccactatggagaatagtatggaggtgccttaaaaacctaaaaatagaactactggttgggcacagtggctcacacctgtaatcctagcactttgggaggctgagggaggaggattgcttgaagccaagaattcaagaccaacctggccaacatagtgagaccccatctctaaaaaaaaaataattaaaaataaataaataaaaatagaactaccatacgatccagcaatcccactgctacgtatatatgcacctaaaagaaagaaaatcaacatagcaaagacatatctgctctctcatgtttattgcagcactattcacaatagccaagatttgaaagcaagctaagtatctaccaacagatgaatggatagagaaaatgtcctacatgtacacaatggagtactattcagccataaaaagaacgagagcttgtcaattgcaacaacatggatggaactggagggcattatgttaagtgaaataagccaggcacagaaagacaaacttcccatgttctcacctatttgtgggagctaaaaatgaaaacaattgacctcgtggaggtagagtagaatgatggttactagaggcctgaaagggtagtagtaggggtgggaagtggggatgggtaatgggtacaaaatatagttagacagaatgaataagatacagtatttgatagcacagcaggtgattacagtcaacaatagtttattgtacgtttaaaaataactaaaagagtataactggaacgtttgtaacacaaagaaatgataaatgcttgaggtgatggatacaccatttactctgatgtgattattatgcattgtatgcctgtatcaaaatatctcatgtgccccataaatacatacacctactatgtacccattaaaatttttttttaaaaacaatcataagactgcaaaaaacacaaccttgcacaaaggccattgcaaccttccacacacacgagtacttctgtaagaatgtctgtccagcaactggccatccaaccttggactgatgccacctttgtgactgatccttgtggccaaggataactgattcaaaataatttaagtaatccttctcattctgtctttaaaaacatcccttgcctcaaccttcttgaataggcacatagtttacaatattacacatattcccattgcattgctactccaaaataaatattttctttagagtctctttctgttacttagattgacagtggaaaaggcagaaaaaggaaataacatatttttataggttgtatttaattttaaaacaagttttgggtgttgtctgtttatttatttttattttatttatttattttttgagacggagtcttgctctgccgcccaggctggagtgcagtggcgtgatcttggctcactgcaagctccgcctcccgggttcacgccattctcctgcctcagcctcccgagtagctgggactacaggcgcccgccactacgcccggctaattttttgtatatttagtagaaatggggtttcaccgtgttagccaggatggtctcgatctcctgacctcgtgatccacccgcctcggcctcccaaagtgctgggattacaggcgtgagccaccgcgccgggcatatttattttttaaagaacaaatttgattcgacgcaatttaaaatgataacataataatgtattttgggggaagaactattatttaaagcctgtggatttcaatttctcattatatattacagctatctataattataattccacgctgccagctgggaaacaaacaaaacgacaacttctagggtggaataaaaaggaagatggaaggcagtttaggtcatcagcgcctacttcttaccagaaatcacctggagcctccattaaaccatactcccgaacttaccacacagctctaattaagtctagagtggggcatagttttagtttcaacaggtgctttatgtgactctgatagcaatgggcctgcagacagttctaaggttgagtgacgtgaaccaggaagcaaaaagacccgaattaaagctataacagcagaaataacgtaagagggcagattccagccatatctgcaagatagaatgaagagggcttagtgatttattggatatgaaagatgaggaagaatctaaaggcaaatgagataatagttgtgccattaaaaagagtctattaagaattcagaaataccagagcttttttaagacgggggttgagaggtaagtcctgttacaatgattacttcaacaccgattaaagtgaatttgagggtgcttatgtgacatttagaagaactgcccagaaagcattcacaaatacagtctagaattcaaacacgacgtccaggacatggagacacgggttaggaaatcactggtatcttagtggtaggtaaatcctagagaacgaattctttgaaaaaagccaaaaattactcatttgaattttgcaaactacagtttcgccgggcttcttagcgacaactgcagctaagtgtcggggacagaagagagactgaagtggccccgcaagccccctttggcaaagcccactccgagaccatccggatcccgacctacaccagagcaaatgtctaatggtgagaagccgcttcaccaccctacagatccgcggtgcagagatttccctgctaaggtcctaactcctgaatgggtacggcgagtacacccgaagaatcgaaaggtacttatcccccactcagttctagaggaagcagcgaggtgggccaagatgcgtggtaaggcccagggactctttgtcaacgaagtccgttaaactttccgccctcccgggggcctcagcgggccaattccactcacttctcggaggctccggcccagcatggtcctcgtgcccagcctgccaccacaggagccaggcaagggggaaaaagaggtcaccggtcgctagtgatgttacatgggcgcagccatctttaattgtcactgagcccttcaacaccgagtacttggattggttgaattgcagcccgaggaaatgatctttgtaggcgattggttggcgccgcaaagccatcccggcggctaaggagagcgggcaggcaaggagattccgggccagggtcgcggyggcagtcggcaagcrttcgattctctggcgttggatcgcgagcggtgtctgcttgtcccgccgaggsctcccaggacagggcagggatctagggggtttgcgcacctgctttttaatgccccgccccccyttttttttttaaagtggagggggtgaaagtgagggaggagaatggacagaatactgactggaacgttaattcgagcatttcatatgcgaagagcggaataacagttccgtattcttctttcagtttctccattagattagcttcattttcgaatgctccgttttgcatgcttaattttgaaastagcccgtggtttggcagaatttgactgaattcaggggtgagagtttgatccagtccaagtgtatttgaatttgagcacgcagttcaaccagtgtttacaatggaatttctgaagacttgtgtacttagaagaaatgcatgcactgcggtttgcttctggagaagcaaagttgtccaaaagccttcagttagaaggattagtactacctctccwaggagcactgtcatgcctgcttgggtgatagataaatatgggaagaatgaagtgcttcgattcactcagaacatgatgatgcctatyatacactatccaaatgaagtcattgtcaaagttcacgctgccagtgtaaatcctatagacgttaatatgagaagtaagttttcaaaagacattgttaccttttttaaaaaaatcactttcataaggtatgccgttttaaaaaattgactacgcttctttggtttacataaatgaatcatttaggtttttaacaatacctctgcaaatatttccaaaatttttgaaattgcaatggccagggaatccttctggccatttgtattgacaaaatataagcttgattgttttcatgcgtccttaaatatgtaagttcagacttgagaactgtgtctgtagctaacttttttttttttgagactgagtctcactctgtcacccaggctagagtgcggtggcctgatctcagctcactgcaacctccgcatcctgggttcaagcaatttctcctgcctcagcctcccgagtagctgggattacaggcgcatgccaccacaccgggctaattttttgtatttttagtagagatggggtttcactatgttggtcaggctggtctcgaactcctgacctcaggcgatcctctgcctccgccccctaagtgctgggattacagacgagccattgcgccctgcctatgtttgtagctaaatttctgtccagggaactttgtggtattctgagatccgtcacaggcttcggaagtatagttgtttcctagtcagtttagaatttatggggttttttgtttgtttttgagacagagtctcactctatcggcaggctggagtgcaagggcgctttcctggctcactgcaacctccgccttccgggttcaagcgattctcctgcttcagcctcccaagtagctgggactacagacatgcgccgccacacccagctaatttttgtatttttatagaaacgggagtttcactgtgttggtgggaggctgaggcaggagaatcgcttgaatccggaaggcggaggttgcagtgagccaagaacgcgcccttgcactccagcctgccgatagagtgagactccatctcaaaaaaaaaaaaaaaaaaaaaaaaaaaagcattgaaatgactttactgtgattgtctcatgaagtctacgtttgtattctttgttttgaagtagtaattgctactaccagttgggcatgccgttttcctttattctttttatattaggcttgaagagaattcagttttttataagatatgtcttttagtggtaagttttactcaatgatcagcatgttttttcatctcctttgattgtaagttctttcaagattgatcccatgctttgtcaacctgtttcagtgcttcacatacgcagttgtcattcagtcactatttctatgcctttttatatttttgttctgacttaagataacaaacttaaattagcagtattttatctatgagtaatttttacattttgtcttcgtttaggtctgttagctttttatttctttaaatgcacatgcgtaattcatgccgtgtacattttcatttaaacagaatggctgtatctagacttttcttggctgctgtttaataatataacactgtaaaacattttacttttatatagtattcttgaaacatcttagttttttatgacttgaatgggtaatattattcgcaagttatcctcttttttttttttctcctaccttttgaggatatttattgtcattgcagaagatatctgaaacagtagcttggggaaataaaataatgagtagaagactgtaaactgtaggaagcagttatttcccttggcaagaaagcaagagacatgtctattttatttgaaagatgaaggctggctgtttttctggagacggccactactgttggaygtaaaataataaatcatagaaatggctaaagaaatgaagaatttttacatggggaaaaaatgcagccaacagcatcataccaacaaagtttggtgtctttagatgggattaaagtctttaaactgatgacagatttaggatttttcaaattggcccaactctctgaacaagtcaaggtgtcaacccctgtcaataggatggaacacttaagggccccattcagtcatccgtgtcaccaaacaggttctcaattactaactgccagctgactacattctgggttcaggggcttgttagatagtaacagtgagccaaggctactcagttgatgtattagcattatcaggggaccaagaaaactaaaaacaaccttgggctgcaggctctgtatctcaaagaggactgaaacctttctgcagctcttaaacagcagctaaagtttgacacgactaaatgtccacttctgttgttcaaaccacatagaagtttcagtgaataattgtttaattatctttagcagtggaaaaggaatgtaaggcaggaaaagtgaagcacatgacttttgtgaatattacaagtgaagttgttttttttttccctgacagagtataatcctgactccccagatggcaaatgttgtaatgttggtataatggccatcagcttagattttctgggactttcccacctttcaaacactttatcccatgtgtcttgattttttattagtaacacaactcatgcaagctacccacctgtcagcatctctctcggtatcttctaccttccctcctgctgtatggattagctgtcactgctttcacataaggccagccctcggcttgtgtttctgatcccatccccctcacctactctgggatatcattccggcaggtgtctcctgcatcatcagtcttttcttttctactggatcatctccattagtatacagacttgctgttatttctcctttcttaagaagaaggaaaaggctgggcacagtggctcacacctgtaattccagcactttgggaggccgaggcaggtggatcacctgagatcaggagttcgagaccatcctgatcaacatggagaaaccccgtctctactaaaaattagccaggcgtggtggcgcatgcctgtaatcccagctactcaggaggctgagacagcagaatcgcttgaacccgggaggcggaagttgcagtgagccgagatcacgccattgcactccagcctgggcaacagagcaagactctgtctcaaaaaaaaaaaaaaaaaaaagaaaaaaaagaaaaaagccactcaaaagtcctctgtccatcccagttcccacttcgagctactgctccatttctctgctccctttgcaacaaaactgttttaaagagagttcagtcttctcatgtctccagtcccttatttcccattctctcaaaagtgcactacacagcagttgctcctggcagggttaccaaaggtctgttagatccaggcttgtttgtttgttttaaagcctcttagcatctttggaccttatttgaaaacctgtctcccgtcagcagcattgaatgtctttaaactgccgccttagtctcctttgctgctttctcctcatccctaagatctaatggattgcccacaggagtgggtgcggggcaaggggagacgtacagagtgggttagtgactgtggagcatgcgttgtggggcagggagtgagtggtacatgacactggagaggtaggcagggtgcctatcatggaaagcctcacatggcagacaggttctcaaaaaaaggtcaagcagaagagagaataacagatacttttgggtctgagaaaagtcacgttgtatatggaagccatgtaataaattactctggattattatagagtagcaaatttacttgaaccaaaaaattaaaagaatgttttcagttttatttagctgatatttatataagtattctttttctttttctttttctttttcttttttttttttttttgagacagagctttgctttgtcacctgggctggagtgcagtggtgtgatcatggctcactgcagtctcaaactcctgggctcaagcaatcctcctgcctcagcctcctgagtagctgggattacaggcatgtaccactatgcctggctaatttttaaaatttttagtagagatgagctctaggctggttttgaactcctgaactcaagcaatcctcccaccttggtctcccaaagtcctgggattacagatgtgagccaccacacctggcctgtaaatagtcttaaaaataaaaagatatgggccaggtgtggtggctcacgcctgtaatcccagcactttgggaggcaaggtgggtggatcgcttgagcctaggagtttgagaccagcctggccaacatgatgaatccctgtttctacaaaattagccagacgtggcgcacacctgtaatcccaactactccagaggttgaggcatgagaatggcttgaacccaggaagtggaggttgtagtgagccaagatcacatcactgcacttgggcaacagagtgaggcttcatctcttaaaaaaataaataaaataggccgggtgcagtggcttacacctgtaatcccagcactttgggaggccgaggcgggcggatcacgaggtagggagattgagaccatcttggccaacatggtgaaatcccatctctactaaaaatacaaaaattaggtggctgtggtggtgtgtgcctgtagtcccagctactcgggaggctgaggcaggagaatcacttgaaccctggaggcagaggttgcaatgagccaagatcatgccactgcactccagcctcatgacagagcgagaccctgtctcaaaaaaataaataaaaagatgtgaaataaaacaacttgattttacacatcagaacagatgcagccaagaggctttttatcactcaggaatttattccaatttatttcaaagatgttgttctagaaacatgtttaaggatgtggggatcattactggtaaactgttgtcagcatcaagtactttatattcttgccttatttatatattgacttcaaacagcttaaacatttgtcttcaccagacctggcaccaaatattctgttgtttaaaaagtttgtgaatgagtacgttaataaagacatgaatacgttaataaagacatcatcttcaaagaacaaagcaaaactgtataaaagataatactaaaagttctgaagacagtttcaaaatttgaatttcaaaaatattttgaacaatggtggctttagtttaataagtgattatcactttccaagtaaattttttttaaagaaaatctttttatgctttcccatgtaatggcaaaaaattataaggttgattacttttttaaaaaacttttaagttgagaggtacaagtgcaggtttgttacataggtgagcttgtgtcatgggggtttgttctacagagtatttcatctcccaagtattaagtctcatacccactagttatttttcttgatcctcttcctcttcccaccctccaccctctgaaaaaccccagtgtgtgttgttcccctctatgtgtccatgtgttctcatcatttagctcccactttagttttctgttcctgtgttaatttgctaaggataatggcccccagttccatccatatccttggaaaggacatgatctcgttcctttttatggctgcatagtattccatggtgtgtatgtaccacagtttttttatccagtctatcattgatgggtagttaggttgagtccatgtctttgctgttgtgaatagtgttgcagtgaacatacacttatgtgtctttgtaatggaatgatttataatctacatcttgaagacctaaaatygtactggactataaccctgtagtagttttaaaagcatttcatacttacatttggaggaaacagataaattgtattttacaggtggttatggagctacagctttaaatatgaagcgtgatcctttacacgtgaaaatcaaaggagaagaatttcctctgactctgggtcgggatgtctctggcgtggtgatggaatgtgggcttgatgtgaaatacttcaagcctggagatgaggtgagttagggaatgccactattcctgcggggatccaacccacagaccctgatccagcgacggatgagagacgcacactgacacagatactttgcctgtcagtgcagctaaggggcttctgctccctgaatctgcagcatctgccccctaaactgacaaagtttgcatttatttagtacagattaaatgacgtaggtctcgagtaaacaccactagagggtaattaacattgccgaccgtgccctgcctctgcagcagtagagagcaatcatgcatccatgaaagatcaaagattggtcttaggaccacttgagtaaacaaactatttagataaactcccccacattccctagttatttgctctattgctatcaactcaaggtaaagagaattaggctgctttcagccaaatgttttactaaagctgtgcaacacccccggccttccaagtaggtttgtgtctacttcctataactatctttataatttttcctcttacaatttttcccaccaccctgactgaactcccacatattcctttactaaatgtgcaaatttcattctgtttcagaagtatattctatgctgttgaacttttttcttcttttcaacaaatatactgagctttgactagaaccatcacttttttggttctgttgttacattttttcacaaacaattccaaaatatcttgactgtacctgagtttgtgttttctaagtttagtacttaagaaatgcaagactttaaaatatatagaattagggtattttttttttccttgaaagggcctttaaatgacaatttctgccttatggatgagatggctttaaaatagcttaagtttggtataatcacctgtcacttgtcactttgaacttttgtaccaagaaatgatagttcataatcatagctaacactgttctggttgctttttataaaataagtcatctaatccctctgaggtagataaagttaggcccagtttacagatgaggaagccaagctataaagaggtctcatagctaataagtggtggagccaggactcagaccccagagattgtggtcttattgggactcgaagtagtcagtaaatgcagcaggatatgctggcatctgcttccagcgtggtttgacttgataaatctagaatcatactaagtaataaatttatatcatgaaaataacactcctgcttggtgtagtgctgacttctgtgtttttcacagcacagggtatatattagggaacactttcttgcttagcttcggtcaaaaaatrtctgtgtttctaatgaagctgtctgtctgtgtgtgtttcaggtctgggctgcagttcctccttggaaacaaggcactctttcagagtttgttgtagtcagtgggaatgaggtaacttaccaactctgctgaaatgcrttagaaagtttaaacaaagactggcaaatatctgaaataaytggtgtttttcagatctagtttatgtttgatggggcagtttataaaaagataatatagaatataggaatttttgagagattaaaaaagtatttgatgccattcagtaacactgcctgctaacgtagctgtttttctctcatagagcagggatttggaatgagacctagaaccctgctgtgttgcttggttttaccctagataaatagttgaaaacagatataggcagtagagaggatggattagtcatcagtggagacatggaaatatccagcggttttgaataactttaaaaacaggagtctaatcaaatacagtcaggagaccaacaaattgaatagagagaaaggggttaacattgaggaaattggctacagaagggagggcaggaagggggaaaaggttattactgagattagagaaaacctagaaagatttcctttccagaaaatgagagtaaaggaaacagctgatctcaaaaactaattaggacgtgtttttgagagttcaaggtttatttggatttacttcacgactaatgggaatattgatgtggtctttttataaacaatgaagtagttatatctgataatgtagcctacataacattactgaacatctgtgaggcaggtagagctattctatacaatatttattaggataatcttggagtagggtatgcatattgcttaycctactccaagatatgcaacagatagagctatgcaatatttattaaggataatcttggagtaagatatgcaacaaacatgaactggaatgattttatagatttatctgtgaaaatacagttgacccctgaacaatgcaggagttggtgcacctacccctgtgaggtagaaaatgcacctacatcttttgactcccctaaaacttaactgctaatagcctactgttgcccagaagccttaccgataacataaaaagccaactaaggctgggtgcagtggctcacacctgtaatcccagcattttgggaggccgaggtgcgtggatcacamggtcaggagttcgagaccagcctggccaatatggtaaaaccctgtctctgctaaaaatacaaaaattagccgggcatggtgttgggcgcctgtagtcccagctacttgggaggctgaggcaggagaatcgcttaaacctgggaggcggaggttgcagtgagcagaggttgcagtgagctgagattgcatcactgcactccagcctgggtgacagagcaagactccatctcaaaaaagtcaactaacacatattttatatgttatgtatattatatactgtattcttagaataaaggaagctagaatatgttatgtatattatatactgtattcttataataagggaagctagaatatgttatgtatattatatactgtatccttacaataaaggaagctagaaaaaatgttattaagaaaatcataggccaggcgcggtggcttacgcctgtaatcccagcactttgggaggccgaggcgggcggatcacgaggtcaggagatcgagaccatcttggctaacacggtgaaaccctgtctctactgaaaatacaaaaaattagctgggcgcagtggcgggcgcctgtagtcccagctactcaggaggctgaggcaggagaatggtgtgaacccgggaggcggagcttgcagtgagccgagatcacgccactgcagtccagcctgggcgacagagcaagtctccgtctcaaaaaaaaaaaaaaaaaaaaaaatgaagaaaagtatacttactattcattaagtggatcatcataaagattttcatccttgttgtgttcaagttactagaaagaggaggagtaggaagaagaagggttggttttgctggtctcagaggtggcagaggcaggaaatccacgtataagtggacttgcacaattcaaacccctgttgttcaagggtcagctggattcctgtgaaggtaaatgtgcttaattgtgttcataggtttgcaagtcattgcttatttttgactgttgtcttcaaatgtaggtctctcacaaacccaaatcactcactcatactcaagctgcctctttgccatatgtggctctcacagcctggtctgctataaacaaagttggtggcctgaatgacaagaattgcacaggaaaacggtaagtgtatcagtcagtggcagcatctaaacctcttttctttccttctgtgagttccttgcagtagatttgtcagagctttgaaatttagtatcatttacacgaacagagctgtactaacatttgaaaacaatttccaaagcattctatttgtgtcagtttgcactttcttagcttcattctgtggattctcagcccaatcacttgggaattttttaactgagatgtgtggatggaatggactttaggagtcagaaccttctaaaataatgcaaaatattatatgtgattctctaggaagaagatccatatcttttttttaatgaaattcctaaaaaggttaagaatcatcccatacagtttctaaagaatgatgtcaaggttaagatgttttttccctacctctcccaggagttattctcacacttgcatatttctataaagggactgcacaactattgaatattcttaagttctctcagtctcaatgcctaatatccattaggtcaattctgattccccartgccttgagcgtgtactcatttgggttagcagcaacatggtgaccagaaatgtctcagatgtacttgagtttatatgtagattctgttgctttccagttgggtgacccactcactcactttttaatgagttttgttttgaaggttaaatgaggtaatgcacattaaactggtgacacagtttatggcacgtgggaggcactcagtaaatggtggctactgttgttagcaaggaggttgtggtgttccttgtattttagaaagttgccatcatagagaaaactgatgattttgttttttgttgagaaaactagatactaagaaccgtttaacaattgtaaggaaggaaggagctgtaggtcaaactataataaattaaaataacctagttttttttattactaaggattgtgttggtaacataactgaagtctgtgtgattctgttctattgttatgaaacattgcactttacatttaatgtgttcggtgatagagcattaaattttatgaaagtttaatagctgtatttttgaaaacttatgaaagctatacatctagtgaggtactacccttccttatcttagaattcaaggtaaatatttattctaaaggtcaaccctgtttactttttaagctattgtggcttatctttcttgaagttgccattttggtcaacactttgtttaaattaaattagttttgaccacatagatttttctaatggtttctcttagttaataaccttgcaaaaaccttattgaagatttttagacctgtattgtaattgtagactctgcaacagcattggttttattgttttgttttttcctttaaaaacattatgttttctatgcctgcatgactatatgtgcactattgttagagagctctcatttcttttactggttcagggctctgtggacttacttttaatatactgtaaaaaacaatttagaagataagaaaaaatttaaaaatttagagacaaagatctgtctcttcttagagacattggtgtgagtcctcagtttgttgttggctttgtgggtaattctttggtactctgttatcttctgtttaagcaacaatggcctggaactgggaagttggagccctgggtcctgttctgccattaactaaccaggtgaccacatgctatatatttatggtctctttgtggtttcctctgagtttatgagtataggacagtgtaggttttgaggagagctttgagaaatggaaagttttagaccttattaggtgatgatatcttrtattgagttgggtctgtttattgatttagccaatgttaaccaatctagagtgaaacccattgcaaagagtctcaacaattcacatcatggacttctgctgcattcacatgttgtgatctgtaggacacatttgtcctgagtgactcagtgagcacagtgagaccttgctgtcttagtcygttcaggctattatcacaaaataccataaactggtagcttaaaaacaagagaaatttatttctcacagttgtggaggctgggaagcctgagatcaaggtgacatcaggttttgtgtctggtgaggaccaactttctggttctttaacagtgctttctcgcttgtcctcatattctggaaggggtgaggatatctctggggtctctctctcttataagagcacaaatcccattcatgagggttcygcttgcatgacctaatcaccccacctcctaataccatcaccctgggggttaggatttcaacatacgaattttggtgggacacaaacattacaaacattcagaccatagcacttggtacttgctgctctcagaaatttcggtttactgaaattaccacacatgggttataataatggcctacctcttttaactgcttatttgtgagagtcacatgagagatgtgagcaccttaaaatactgtaaaaatacttttaatgaagaaattctataatgagattttattgtacctaaactcagaagttccagtgtccaaagtggattttccatttgactattcattgtgattgatggagcatattttggcttcaatatgctaagcaataactgttctttttctgttagctattagctattggcattaaggcatgccttagtctgcacaaagcacatcagtatttgttatcaaagatgaatcatcttttttttctaatcagttaattaaaaaaaaacaaaattaacaatgacaaaaacacctatcagcaccttggaagattttataggatttctttataacaaacagcttatttgaaattaggacaaatctttctaagggttcaatgatgtttacctttttccccctttgttctgtagttacttttctgcagcagctgagtatcagtgaaccaaggaaatagtttattcttgatgtcatataatactgtcattttgtccacacattgatatcattagaaaatgtcaagtgaggccaggcgcggcggctcatgcctgtaatcccagcactttgggaggccgaggtgggtggatcaagaggtcaggagatcgagactatcctggccaacatggtgaaaccccgtcgctactaaaaatacaaaaattagctggacgtgttggcacacacatgtagttcaagctactcgggagcctgaggcaggagratcatttgaaccacagarttggaggttgtagtgagctgagattgcgcaacggtactccagcctggtgacagagcaagactccatctcaaaacaaaaaaaaagaaaaagaaaatgtcaagtgaaaattattttctttttatcagcccatctatagtttcttcatgatttgttcagtaggaacacatagataacttagggctctcaagataagtagaaatttttttaaaaagttgttacaacyrgatattttttgaatatgttaagatttgatggttttatttattggtagtgtcattggtgcacttgaatatttcatgctctgcctgaaattcatgtcttgcygggaaagttgtacttcaytctgtttgacagaagtattaaaaggtgttaggtgtagtgttgcgtgcctgtagtcccagctactcgggaggctgaggcaggaggattgcttgaacacgggaggcggaggttacagtgagcygagatcatgccactgcactccatcctgggcaacagagttaggaattgaactattcctcctccacaaaataaatttcacttttaaattgtgtatacttgcaactcaatgaagtgaatttaggaatactttttttttgatattaggttttatggcagtaaaattttgtcatgtaagtgtaaattaggtgtctgattaattctgatatagaattatagaattaggcccagagttaaaaacattgggtttattccctaccratatgcttatattaaaattaaaatgacagccttcttctttcaaatgcattctaaggccttttcttcaccccaccaccacctgtttcttcccactccccaagcccattacccttttggactttaagttttcatttgcacctgactgggttgtattgttaggggggtaaggggaagtagaaagaaaccccagctgttttcttgcataaacaaagtatggggttgaggaggcaaggagagtgagagtggaggctctggcttggtcagtgtgatggaaatgaatcttcctttgcttcaggtctattttccagggagtcctgggtgggggggtgggggctgtgggcacttgaaagaatagcagaaacctcactcctggaaatttgtgttttatacaatagctttctaagtgactaggttaactatctcgtgaggttacaagtcatttactcttcaatggactgtaatctagcttctagccttgcctttcaattgcatctgccctcactggggtcgtagctaacttaagtgacttaagttgccaagcccaaagacatttttcagttcttattttaatttgatctctctgaagtagctggcattgttgaacacttcctaaatacttacttttcgtatggtttcagggacattaagacttttaagttttctttttttgttgttgaacatttcttgtcatttttagaagcccccacttcttcctccagccctttaaatgtgctgttttcccagtattccactctattcttcctttttgtttcccagggttatctcatctactcccagcttctacttatagtttggtaacttacagatctgtatttctaactctgtcctcttactgagttccagtcagatgttctctttatatctcaaactcaacttgagcaaaacaacacttaccaactaccaccccaactcttcctctgtaatcctaatgtcagttaattgtggtttaccctaagtcaaaacctgacattgttcataaaccctgctctttcaccttcctcagcactactcattattgttcgtgtcatgtaaaatataagattgttgccaaatttggaacaatgtcttccaagttccttttatatgccagctataagatttgtgaacccaaaatatctgagacaggtctcagtcaatttagaaagtttattttggcaaggttaaggacacgcctgtgacacagcctccggatgacatgcacccaaggtggtcagggtgcaacttgcttttatatatttttggaagacaatacatccatcaatacacataagatttacattggtctgatcttgaagggtgagacctcttgaagaggggtgggcttccaagtgataggtagatttaaaaattttccgattggcagttggttgaaagatttattataagtgaaatggaatgtctgggttaagataaggggttgtagagacctaggttttgtcatgcagatgaagcctccaagtagccagctttagagagaatagactgtaaatgtttcctatcagattcaagttctgtgttgatgttaatgctgcaggggtataatgaggcctgcaacctcctctctcatcatgagcagaactagattttcagggaactctggaatgtccttggccaagaagaggagtccattcagatggctggggccttagaattttatttttggtttacagatttcaaggcatttcacgttttcttgtgtagtgaataagcctaaaatactgttgtattttaatgaacaatcctgattagtttgttgttaacctcttccatatagtgttgtcttgtaaattcttacatttttttaattggaggaattttccacagactagcttctggctttgtacatttcaaaccttgtttaactttctttctccttcactactcacatgaccctgtgctgggtgcagtgatacacagctttaagaaaatgtcatgtggcttaggtgagttgacttaatgagaggtaggaagaaattcctggaaggcatttcttaaactaggacagctagggataacttaactttacacagaagtgactacgaaccacatcagtattttccactaaaccccaaacaagtatatttccaatcaacttccctttagctagatctagtatcacctgagaaaaaagcaagactgatgagtaagagtgaaaaaagaccaatcttaactgattgtggttagcatatcttttacaaattttacaaaaacatgtctgttacatataaagtttcggcgccacaaaagaaatagcacttgaatataaaattttctttttaattctcagcaaggccagttacttctatatagaagggtgcgcccttacagatggaacaatggcgagcgcatgtttggacaagggaggggaaggggttcttatccctgatgcacgtggcccctgttactctgtcattcccctattggctagggttagcccacacagactaaactaattctgattggctaatttaaagagaatgatggggtgagtgctttggcgggagtcagggcagagcaggtagcaggtaatcggaatgagttatggtggagcaggtgatggaatgagttagggtagagcaggtgattggaatgagtcagggtggagcaggtaattgtaaaagagttgctttatgaggaagtttaaaagtagaaggcaaagaattgaacatactgacatattaattatttgaaaagaaatttagaactcgtatctaacatgtctatgcaaaatattgctagggttcctctctgggccttgtgtaagtgaagggcttcggcttcattggctccatggtaaatcctctgacctcactacttctctctgtcttatgccctattgtcacccatcacaagcttttttttttttttttttttttttttttgacggagtcttgctctgtcgcccaggttggtgtgcagtggtgtaatctcggttcactgcaacctccacctcccaggttcaaacgattctcctgcatcagcctcccgagtagctgggattataggtgcccgccaccatgcctggctaatttttatatttttagtagagatggggtttcaccatgttggccaggctggtctcgaacacctgacctcaggtgatccacctgccttggcctcccaaagtcctgggattacaggcgtgagccaccatgccctgcccatcacaagcatttttccctctatctgcttctgtataagattgaaggaaccagtgatttgggatggttcccactgcctatcccatttggggggatacattcccagtacccctggttgaaattctgaatacacttcggataacaaagccattgttatcctgtgtataaagttcttcgtcgattatgggttaactaagtcttcataaatggcttaccctggccaccttaccaagatatataaatagctttgttttcttgggaaaatgtgtttaactttctaaacatttaattcacacacaaactcttctgtaaattgggggatgtcaacatgcattacagaggcttagaagaagaggacacataaatctaggctatcttggtctcctttgattgatttgttttgtagctatatttttccacttattcagattaagtttctcactcactttaagacaataaacctggcgtattatgctaagacactttgctatcttttatctgttttccccrtgatttaaaagtcatgtgtgtttcagaacctccacaaggctgagaaaaaaagtagtttgtggaggtgaaagatgagatacattttcagcataatccttatttcttaaaaccatttgtttctactgatggtcgatttcaccatatttaaatcatctttgttcataagtcattaggatttaatagatgacactctaatcttataatgtggcttttttcactataaatctggggcaattttgaaggccatatatgtctgtttcaaaggtggagaaacaaaatataagcttaaattagatggaaagcacctgttctttttcattgactcccagagtacacttctgtcatcatcattttgtaggtgacagatctgagggccagggattccattagagagagagttgaaacctgaacccgtgactctagatacccagccctggcattcagagatttttgggatcaagtcagaatatagaaacttgaagatgattttctacttctggatgtcttgctgttttgtagcatgtttcgtgtttttgtttttttttttgtaaggcagctaasggggttggcgccctacctcataagattacaatactgaaaactgtgattgtagagggcttaggtgcccaaatgccaaataaaaagtgactcagtcatggaaaagaagccaacattgcttcagtgccttaatgtatgtttagggagaattcagagattaggcaaaaaggacagagcaagttagattttagggtttaagaatgcctaagtaatgtaatactgattcatattttctccatatttaaaaaatatctgtcactagtacaatcccttctgacttccaaagaagctctatatgtgtacttaagaagtaatagaggcatgcaattaaaaaccttggcgattttgaataacagtgcttttttcaagtagagtatttctgtacacactttatataaaccaacaaatacagcacacgtttcttcactatcacarataggcttctacttcagtgagattcgaatatatagtgtggccattacagcaagctaggtaaaaagtattcccactgtgtaggactkaagtgaagggccattgggaggtcagcaacagcagttgcttccctttgcattgaacgtgctgtgaagaatacaacaagaataattagttgagccacaagacttcagactttagaagaccgaccggcttattgttggcttgaaaatttattttgccrccgggtgcggtggctcacacctgtaatcccagcactttgggaggctgaggtgggcggattgcctgaggtcaggagttcgagaccagcctggccaacatggtgaaaccccatctctactaaatatacaaaaaaattagccaggtgtggtggtgggcgcctgtagtcccagctactcaggaggctgagtcaggagaatcccttgaacacgggaggcggaggttgcagtgagctgagatagcaccattgcactccagcctgggcgacggagtgagactccgtctcaaaaaaaaaaaatttattttgcctactctctttttggggactttgaagaaagatatggttgaaacctgcacaaaatgtggagtttacaggaccagaaaacgatgtgtcctcagggctcctttacaagctaacagcgcttcattcattggacctgctccttgctgcttttgcacttggggtcgccatcaggtggcaacacaaagaattgaagctgctattgcagaaccactcttgctaagccctgctgtgaaacacagttttgcttttttatttgagggaatgaagttgctttggatcaagagttatagggaagagatgaactgacaataatgaggtcggagatgtatttggcagttggatcctgaagtagccattatatttagtatccagcattcacagagagagaattagaaattattttcaagcttttctttactggaagaaacttgaatgcagtctttcaagtagccaggcgatcccctcacttgaggtagtagcagttgttgccttgattgtaggacataatggtgattggatgatttctttttttagagacaaggtctcactctgtcacccaggctagagtacagtggcacaatcattgctcactgcagcctcaaactcctgggctcaagccatccttccacctcagcaccaccatacctagataatttattttttatttttcgtagagatgtgatctcatgatgttgcccaggctgatcttcaactcctgggctcaagcaatcctcccgcctcagcctcccaaagtgccggattacaggcgtaagccaccatgtctggccatggatgattttgaaagtcaagaaactttgatcaggcatctgctacatccagggcactgtggccaatgcagggcataatatgaagtctctgaccttaagagcttgcagaataagttgggaagtaggatgtgtggcatagataacaggttccaggctatgttaagggtattgtagaggaaaactgggacttggtccttcaagggaaaggagacctcagcaggtaattatagcattctagagcctggaggaatggaccagtgtgtgtgcaatgtagggggaagaattaggggaacagagtctcagaggaagagttccattcaggaaatagtgagaggaaaagttggagagtgcaggtaatatattgtgaggaacttaaatgagaatttgactagcaacacttctataagaatggacaaaagtaagagggtgaaatatttcatgggggaattaatttttgaatgtatttttgaagcacttttcatacttttttccctcatttaggaagactaaagctatgtttgaattgtcagggcaaaaggtactttacctctgccctctgaaggttctataactgagtctgctgaaatcaactgataatagattaataggagaaaagttatacacattatttatttccttttaatgttagttgatatgtaatgtacacatttatggggcatagtgtgatatttcaatacatggataccatgtgtaatgatcaaatcagaacaatcagcatatccttcargtcaaacattgattatttctttgtgttgggaacattaaaaatcctctcttttagttttttgaaagtatacaataaattattattaactatattcaccttgtagtgctatagagtactagaacttattcttcctatctagctgtaattttgtatttgttaaccaacctcaccctgttcttccctccctgctacccttcctggcgactgataaaccacagttctactcactgcttctgtgacttcaaccttgtctagctcccccttgagtgaaaacgtggtatttatcttcttgtgcctgacttatttcacttaacataatgtcctccaggctcatccctgttgccacaaatgacagaatatcattctttcttttttatggctgaatagtattaccttgtgtatacataccacattttctttacctgtttatctgttaatggacatttaagttgattccatatcttggctattgcaaatagtgttgtattaaacatgggagtgcagatatctctttgatatgactgattctccttcctctggataaatactcagtagtaggattgctggatcttatgatagttttacttttagggaaaacttcataccgttttccatattggctatactaacttatattcccaccaaaggtgtataagagtccccttttctctgcatcttttccaatatttatttttttttgtcttttttctatatggaacacttcacaaatttgcatgtcattcttgctcagggaccatgctaatctttgtgtcattccaattttagtatatgtgctgcctaagtaagccctgttttttgtctttttggtaataaccattctaactagggtgagagatctcattgtggtttgaatttgcatttccctgattattagtgatgtacagcatattttgcctatgcttgatcatttttctctttttgagaaatgtctgttcagatcctttgcacgtttttaattggattactagtttttttgttgttgttgagttttttgagttccttatatattctgggtagtagtcccttgttggttgtagagtttgaatatactttctcccattctacaggttgtctcttcattggttgtttcatttgctgtacagagttttttagtttgatatagtcctatttattaatgtttttgctgcctgtgcttttgaagtcttacctatatcatttttgcccgtattcccatatgctttcttctaatagtttttttttgggtcttatgtttaagtctttaattcattttgagttggtttttatatatggtgagagatgggcatctagtttccatttttctgcatatggatatccaattttcccagcaccatttattgaagaaattatcctctcaccaacatcaattcttgttgcctttgtcataaatcagttggctataaataggttgatttatttctgggttctttattctgttccattggtctatgtatctgtttttataccagtaccatgttgttttggttactgtagctttgtggtatagtwtgaagtcaggtagggtgatgcctcctgctgttttrtttttgtgcatattgttttggttattcaaggtcttttgtggttccatgcaaattttaggatttaaaaaatttctgtgaagaatgtcattgatattttgataaggcttgaattaagtctgtagattgctttgggtggtttgttcattttaacaacatttatttttccaatccatgagcataggatgtccatttttttgtgttcttttctatttatttatttaatttatatgtatgtttttgagataggctggtcttgaactcctgagctcaagcgatcctcccccacttggcatcccaaagtgctgggattagaggtgtgagccaccgtgcctagccctctttgatttcttttatcagtgtttctagttttcattatataaatctttcacctccttggttaaatttattcctaagtggtttttttgtagctattgtaaatgaaattgatttctttttcagctagttcattgttggtatatagaaatgccactgatttttaaatttttatttatatttatttatttaaaaaaatttctttttggagacagagtgttgctctgtaacccaggctggagggcagtggcacgatcttagctcactgcaacctccgccttcctgggctcaagtgatccttccacctcagcctcccaaatagctaggactacaagcgtgtgccactgtgcccagctaatttttgtatttagtagagataggttttgctgtgttggccaggctggtcttgaactcctggactcaagcgatctgcctgcctcagcctcctgaagtgttgggattacaggcgtgagccactgctcctggctgctacggatttttgtatgttgattttgtgctactttaatgagtttgtttatcaattctaagaggtttttggtggtcttttgttttttctatatgtaagatcatgtcatctgcaaagagggacaatttgacatcctcttttccaatttggatgccttttatttctttctcttgcttaattgctctggctagtacttccagtactttttcctgtagatgtatctattgtgttgtttgagtagagtgctttggctttgktcctgggtgagcgcagtagtgtagtctctgtatgatttcttttttttttttttttttktgacagagtcttgctctgtcgcccaggctggagtgcagtggcgcgatctcagctcactgcaacctctgcctcccgggttcatgccattctcctgcctcagcctcccgagtagctgggactacaggcacctgccaccatgcctggctaatttttttgtattttttttagtagagacaggatttcaccatgttagccaggatggtctcgatctcctgacctcgtgatctgcccacctcggcctcccaaagtgctgggattacaggcatgagccactgcacccagcatctttgtatgatttctttggctgtaatcactatcaatcgtgtcagtaattcctcagtggcttacgctgtagtttgtggaggctgttaggcactttttttttttttttgagacagggtctcgctctgttgccaggctggagtgcagtggtgccatctcagctcactgcaacctccacctcttgggttcaaacgattctcatgcctcagcctcctgggactacaggagtgtgccaccgtgcccagctaatttttgtatttttaatagagacggggtttcactatgttggccaggatgttctcgatctcttgccctcatgatctgcctgcctcggcttcccaatgtgctgggattacaggcatgagctaccgcgcttggcctgttgggcacttttgttggacataggggtgccaggcagtctggttctcaggtcactaggtgacacatacagctacatggcattcctgctgctggtgtggatggcaggctttgggtggactagtcctcagcactgtggtcattgtgcatgagggccagcagtggtagttgtgggccccaggtgaactggtcctctagtctctgcactgcatgcatggcagtgtggcagctctactactggaggggtggggtcactgtcagtgttggtggcagcagacctgggcaggtaataaggtgcaggtgcatggaagtcacacaaggtacaaacctcaaagaagggccaaatgggtgatgcctacataccctcttcatagggtggagggaaggggagtatgtaggcaattttagaggaagagcaaattattttgaggggagatgaatgggcccaaagaacagacagtagcctaggacaaaattcatctgggctgtgtgtgtggcacctactctagtcttctttcatgtgagttaatcttctgtgtttggtgagattatagggagggggcccaagaaaatagcattccttctgagggaacttcagagaaatcgtccctttgcacttcaggagagacaaagggaagggatgagagaccgtggccgggatggtgagagaaggtcagagagaccttcgttctgaggctgcttcttwacttcaaagtactcagcatgtcaaagtgacatactctggggtattgttttctgaaccctaacaggatctttaaaatttcttctagtctttataattttggaaattataaatccttctagaaggaacacaatttggaaggagacttggcttaattacatttaatggttttaatttcaaagggaacaactggctcaaaaattttagtagtaactgttaagctataaataagggtgacaaacagccttctatgatttgggcaagatagaaaaaaatgaaatgaaactagggtgaaggttatagatagaatgcgtgttccaagatttggtgtacttactagagataggtggcaaaattccctgcactttccagcagccaaggcagtagggacccacactagcagttactcaatttacggtgatgttaaataggacagatactgccaccacttagtgttcagaaaagtgttttttttgtaggccgtcataaagagaattctcatgaattctgtcaacaatatccccttagctaatacagtatcagatatcaaacaatcactttttataatgtccctcagcctcaatcagtagcatgacaccaaagtacagtacaaacaattttctgggacttgaaaccatccagtccaagtaggcagttctctgaagctctaccttaatttaagaataaaatgtaagagcatggaaagcagttttttgactggtgattctcttttggattgcacacttctttgggaaatagatgataggtctagattcctttccttgtcaataagcatatgcatcatcgcacaaattttacatgttattttaggaaattcacaatttcagagagttcataatcccttaccctacccctcaccccttcacccttgtcccgccccaccctcctgccctgactgatccaggctcagcaccctggtcttcaaggctattgtgagttaacatggtaagaacatgcagtatgaggatggttgtgctggtttgacagattcctctgctttaacaggaagccacatcgaggatgggaattgattttcatttatgaaagttgatgaacttgacatctctgaacaaaagatgtttatttcrctttggtgagaatgtagtcaggaatgtgatttttcttagagaacagctaagcataacaaattaaaaagggccccaaatctccctctcatagaggaagctctaacaattttagcctagaaaaattataaggcagatattacaaaggaccatctgagctatcttaaaccaacaaattattggtattttcggtatttgatattcttggtacagagctcatagaatgtctttattttaagcaactgcagtttcttggtgaacctaaaataaaaatccttgtgtaatatatcttgggaagctgaataactttattttcttttagaattatttatcatcttatcatcaaccagttatatgttgaaaacgtttatccagttatatctgctttagattctcgttaattgtggtttcctttgcatttcagtgttctaatcttaggcgcttcaggcggagttggtacttttgctatacaggtaaaaccattttttaatcttgtgaataggaggattttgtttgcatgaatttataaattaagatacattatttctccttaaaagctgagagaaaggtaggtctggtaaatgtactgtaatttcagcttgttctgtaagaggaaaatattctttttttattagaaaaaattattttttagagatggagtcttgctgtgtcacccaggctggagtgcagtggcacaatcatagctcactgtaaggaaaatattctaatgtagaaggaagcattaagctttctagtagtttaatatgagtgggtgtgtggatgtccttgataacagacgtaggaaagcttttaagaaggaagaccatgggcagtgcaggtagatggaagttagcaatttaataggaaacagccaatgtcaaaaaccaatactagtttccaagcagaatttttgcaggctaaaaagcctgcaaaatgtagaaattggtaagctgattctaaaatttatatagaaatacagtagccaaaataccgttaagatggcaatactcccctgaagtgatttatagattyagtacaatccctatcaaaatgcaactgctttttttttgcttttcataaatggacaagttgaccccaaaatgcatgtggaatcacaggggaccccaaatagccaaacaatcttaaaaaagaataaagttggaggactcacacttgctgatttcaaacttactacagagctacagtaatcaaaacataagggtgaacttatagatcaatggaatagaattgagcatccagaaataaacccatacctctgtggtcaattgatcctgacaagaatggcaagaccattaaatggagaaaataatagttccttcaacaaatactgctggaacaactagatatccacatgcaaaagaatgaagttgagcccctacctcacatcatattaaaaaaagaaaaacaaccctcaaggtcaggcatggtggttcacacctattatccctacactttgggaggcaaaggtgggtggatcacttgaggtcgggagttcaagaacagcctggccaacatggtgaaaccctgtctctactaaaaatacaaaaattagttggacatggtggcatgtgtctgtaattccagttactcaggaggctgaggcaggagaattgcttgaacctggaaggcggaggtttcagtgagcctagatcaygccactgcactccagcctgggtgatgagtgaaactctgtctcaaaaaacaaaaacaaaaacaaaaaactcaaaatggatcaaagatctaaacataagagctaaaactgtaaaactcttagaagagtaggcagggaaagggaaaaaaagagtcttggaaggaaacataagacaaaatcttcatgattgtagatttggcaacagatttttagatatgacacccaaagcacaagcaaccaaagaaaaaaattcatcaaaattaaaaaaacttttgtatgtcaaagggcactatcaagaaaatgaaaagacaacccacagaatggaagaaaatatttccatatcattttctggtaagagtctagtatccagaatatataaagaactcttataactcaacaacaaaaagacagcacagtatttaattagcaaagaacttgaattgacatttctccgaagaatatatacaagtggccagtaagtccatgtaaggatggtcaatatctttatttattagagaaatgcaaatccaaaccacagtgagatactgtgtcttacaataaaaagcaaacacagaaaataaaaaatgttagcaaagatgtaaataaattagaacactcatacattgctggtgggaagttaaaatggtgcagacattgtgggagagtttcttgggtcctcaaaatgttaaacatagaattaccatatgacccagcaattccattcttaggtatatacccaagagaaatgaaaacatatatttaagcctaatcttattcatgaatattcatagcagtattattcataatagtgaaaaaaagtggaaataactatcagttgatgaatggataaacaaaatgtggtatagacatataatggaatattatatatctatattatatatcagccataaaaaggaataaaatattgatgatgatayagcatggatgaatcttcaaaacatgctaagtgagaaaaatccagaaacaaaaggtcctacatattgtatgattccatttatatcgtatgtttagaataggcaaatccacagagacagaaagcagattagtggttgtcaggggctgggggtagatggagaagggagtggggaatgactacgtaatgagtgtgaggcttattcttggggcacttaaaatattctggaattagtggtgatggttgcacaacattgtgagtgtactagagactactgtatactttaaatactttaaaattgtgaaaatggtgatatatatgaattttacctcaaataaaacaaaacaaaccaaaagttccccaagcctccagaaacatgatggggcccagtgactgctcctgttgtggtcagatgtgtaactgactggctcctagaagagggagcttgattaagmctctctcaggatgaggggagagattcttttccccagtaggggccagcgagtagcctcagaggctctgccacattactttccaggagggaggtttgggtgttatagaccaccccagaccsagcttagactttttgagaacccagatggtgctggaggcttcctgtctgtctgctgactgaactaggtgaaggaggcgaggattcctgggatgcacactttaacttcttttaactcatcatttgataatcagaatccaatccagaggctcagtaaatatgagttgaatacataaataaatagaagaaaggaaaagagggagagaggcaaaaagaaaagagaaatatcatacacagttggttagagtataaattgatacagccacttaagaaaaccatttggcatctactaaatgtcaatataaattgtaaaatttctaaaaaaaaaaaaaaggacagcacaagaattcctattttaggattataacctatagatagatatacaagtatgtttaccgaaagatatgtaccagaatttcagagcagggctattcctgttaaaattccccaactagaaaaacccaaatgtccatcaacagtaaaatgagtaagtaaattgtggtatattcttacattggaatattatgcagtcatgaaaaaactataattgcacacagtgaagtggatgaataccacaaccgagtgttgagtaaaagaaatcagatgcaaaagtacatcctatatggttccatttaatgacattcaagaacaagtgaaactaagcagtggtgtttaagggtggtgtctacttagtaaaacttcttaaaaaaaaaaaaaagcaaaaagggttacactaaaggtccagttagtagttactttttaagggagttgaggaggttttaattgggaggcttagggacacaggtggtatwctaattcttaattttgaatagtggttataataatatttgctttgtaataatttgttaagctgtatatttatattctgtatgcttttatttgtattatattttacaacaaaaaattttaataaaattaaaaagtaatagaaaagcatcaaggttaaatcccatacaaagctattataaggaaagggaaaataaggtatagaataacatgccctataataaaagcacatcagaatacatgcctacagaacagcctgaaatgtcacctactatttcaaagcaagttaaaagacattaaaaatataatacaagatgtgaaaaaaacaaaataaatcagaataggaaaaaatcaggaaaaaagtaaaactaaatgaaaaaatcatttagtaatagaagactaaactaagaggaactcaatagcaagtaaacacaacacataatgctccttaatagaaacaaaatgcatggatcccttccttacaccttatacaaaaatcaattcaagatggattaaagatttaaacgttagacctaaaaccataaaaaccctagaagaaaacctaggcattaccattcaggacataggcatgggcaaggacttcatgtccaaaacaccaaaagcaatggcaacaaaagacaaaattgacaaatgggatctaattaaactaaagagcttctgcacagcaaaagaaactaccatcagagtgaagaggcagcctacaacgtgggagaaaattttcgcaacctactcatctgacaaagggctaatatccagaatctacaatgaactcaaacaaatttacaaggaaaaaacaaacaaccccatcaaaaagtgggcgaaggacatgaacagacacttctcaaaagaagacatttatgcagccaaaaaacacatgaaaaaatgctcatcatcactggccatcagagaaatgcaaatcaaaaccactatgagatatcatctcacaccagttagaatggcaatcattaaaaagtcaggaaacaacaggtgctggagaagatgtggagaaataggaacacttttacactgttggtgggactgtaaactagttcaaccatcgtggaagtcagtgtggcgattcctcagggatctagagctagaaataccatttgacccagccatcccattactgggtatatacccaaatgactataaatcatgctactataaagacacatgcacacgtatgtttattgcggcattattcacaatagcaaagacttggaaccaacccaaatgtccaacaatgatagactggattaagaaaatttggcacatatacaccatggaatactatgcagccataaaaaatgatgagttcatgccctttgtagggacatggatgaaaytggaaatcatcattctcagtaaactatcgcaagaacagaaaaccaaacaccgcatattctcactcataggtgggaattgaacaatgagatcacatggacacaggaaggggaatatcacactctggggactgtggtggggtgcggggagcggggagggatagcgttgggagatatacctaatgctagatgacgagttagtgggtgcagcgcaccagaatggcacatgtatacatatgtaactaacctgcacaatgtgcacatgtaccctaaaacttaaagtataattaaaaaaaaaaaaaaagaaacaaaatgcagaaaaaaattcaaattacaaaagaaacaaaaagataggctgggcacagtggctcaccctgtaatcccagcactttgctaggctgaggagggcagattgcttgagctcagcgattcaggaccagcctgggcaacatggcaaaacctcgtctctacaaaaaatacaaaaattagctgggcatggtggctcatacctgtaatcccagctatggagaggctgaggtgtgaggatcacttgagcccaggaggtcgaggctgcagtgagctgtgatcacaccactgcacttcagcctggacagagtgagacctatctcaaaaaaacagaaaaagataaaaacagattcaagagaaagtatcaaatattgatgacaggcaaggaaaattgatatatggatactaggagtcctcgaaggggaaaaccaaagcaagggaattgaacccatattaaaacaataattaaagaaactttcctactgtcctgaaattaaatgatttgaaattacatattgaatagacacatcacttttctaaggacatggacccagactgagcaacactaaggaaaattactaataaaaatgtggagaaaaattatagtgaaattactggcctttaaagaaaaaagaaataagatcctttggaaatctagacaaaatagcacatgtgctacttatgtgtccatataagaaaaaagatgacrtgacttataagagaaataaaattagactatcatgagactttttggcagtaacacttttggcagaaaaaaatggagtaacatatttaagatactcaaggaagagtgcgccaagaatcttttatacaacaaaacaggccttcaggtatcatggacacatacagactgttatcaacatgaagaacgtggggaatattgttcttctgatccttttctgaggaatctactagataatgagcttctgactaggaatgactatgaagacattttaaggactagtggtaaatgttcaacacaattacctgtagaacaaaactaaatgagggcttagaaggagagagtgtaggaacagccatatgttctgataaggtaaatacagtgcaatagttgtcattatttttgagacagtgtgttgctctgtcatccaggctgagatgcagtgacatgatcacagctcactgcaacctcaacctcctgggctcaatgatcctctcaccccaaactcctgagtaggtagaactacaggcacatgccaccatgcccagctaattttttcacgtttttgtagcgatggggtcttgctgtgttgcctgggctggtctcaaattcctggcctcaagcaaccttcctgcctcagcctcccaaagtgctgggattttgtagtctcaaattagaattggaagtatcaatatgaactcaagagatattttgtgtatgtgtgtatgtaaagccatcacttgaaatatcatttctcactgaaacaaggcagggcttcttagagaagtagctgatttcagatctagagcacaaatataaagaattaacctggagtatattaaatagcaaggaagatatcaaagactagtcaggtcatgtcaaaagactcaagagctaacttgaagaaatgcccaaagatgtaacartttgagcttcagtaataataatgaccattacaatgggttgaaaccttttaaatatatttaaatccatgagttcatgatacttttttcaaaagaggtcacttttggaatttgatagggaaccaatttattatcttataaactgataaagaaaaacagttaagcatttgtcttgcctttcctacatkaactgtataattgagcagacaaaataatatgtgaggggcagtgatatgaggggcagtgttattttgtgaaagtattcaggctggacgcgttggctcatgcctgtaatctcagcactttgggatgccaaggcgggcagatcacctcaggtcaagggttccagaccagcctggccaacatggcgaaaccccttctctaataaaaatacaagaattagccgggcgtggtggtgggcacctgtaatctcagctactcgggaggctgaggcaggagaattgcttgaacctaggaggcagaggttgcagtgggcagagatcacaccactgcactctagcctgggacagagcgagactgtcccccacaaaaaaaaaaaaaaagaaagaaagtattccaactacttaaataaaagaagtagaattagaagatcactatttcgcaaccaccaataagcagatatgggtattaagcattgacagctgctaagataataaagagagcctcaagcagacatgatgtgcctcctctagttttgccagacactgtccatagttttgctaaagggattgaaatggaatcagatctagtctccagatccatctgccgagttgcagaaaatacagaggacagagcgacgtgtggaactgtcccgtgggtgtgcagttagaaattccagactgtgggaaactccacagatcaaatggcctagattcttccatagataaattataggaaagcaaagggatagaacaggagcctatgatttaaaagagacttaaggccgggcacagtggctcacacctgtaatcccagcaytttgggaggccaaggcgggtggatcacgtgagctcaggagttcaagaccagcctggccaacctggtgaaatcccatmtctactaaaaatacaaaaattagccaggcgtggtgtgacgtgcctgtagtgccagctactcgggaggctgagggcaggagaatcacctgaacctgggaggtggaggttgcagtgagccgagatcatgccactgcactctagcctgggcaacagagtgagactgtctcaaataaaaaaccaaaacaacccaaaaataaataataaaaaaagagatttaaaagataccacgttttaagaatgcacaagactatagtgtctagagactgcattgttgggtgataaactttttgaaatgcaaggaggtgattactataaaaatcagaataattattttgggaaagggtaggaggggcttctgtggtttggggcacatgggagaatttttggcatagcttccagtgtgctgctgctttatctgggtggtgttcaccctatagctgttttctttctttctttctttttttgttttttgttttttgagacagaatctcactctgtcacccaggctggagtgcagtggtacgaccttggcttactgcaacctccacccccgccggctcaagcgatcctcccacttcagcctcctgagtagctgggaccacaggcatgcatcaccaggcccagctacttttttgtatttttagtagagacggggtttcactacgttgcctaggcaggtctcagactcctgagctcaagtgatccatccatttcagcctcccaaagtgctgcgattacaggtatgagccaccacaccccgtctataggtgttttctatagttgtgttttatattacatgaaaaatttttattaagtaaaactgtttttaaaacattttcataatgttcaaagataataaatagctctaaatgggaaaggaaaaactagaaatttgaggggaaaaaccagaaatttgaggaaaaaaacctgtttcaacatgtgacagattcttcctgaggatttaatactgtttaaagaaaaacatgtattaaatgtgggtgcttagaacatacttttctttttcctcaatagtttcttttttaatataggtatagagaaaggatggtcacaatgagctattcatcttggattatattcttcacatatttgaatttgatttgggacttgctgtgaaaagcaacgtatcattacactcaagtgtctctgtttgcagcccataaacaataaattgtatatcatatcactcctaaatatttcaattccccacagattttcaggatatataagtctttggtcaatgttgctttttaaaagtgagaaattgggtaagattatgaataagttaaaaaccctttatttacattttgtatttaacagaaatttactaagcacctttgtgtgccatggagtagggattcaatagtgaaccagacaaacacagatcccttgtattctagtgagcctttatatcttatattaaggaagttcaggaaattgatacttaggacaagattgagaaaacaagtgatctctkatgatctataattatctgcacaaaaatttcttagtaatcttcaagtggctattctcaaattagctgaaaatagcccccttttaagtctatgaaattaacattatagaaaagaattttagcaattttggagcagaatgctttctggatacttaattctgaataacattagaatttagctctccttttaatttaaatctagttattctttattattttaaaatataaggcatctgcattttaaaacctgggtaacatttatttaggttttcttactccaagggagaggacctgatccaagtttttaagaaaaaatgattatagtttcttccccttctttttaagagaaccttttcatatgttacctattacttaatagctcattactttgacacrctttctgattcaatattgtgttaacacttattagagatgcaaatgaagatatgtggcattttaatgttctgtatacattttaaatagtcatttttctgaagacatactatttttgggccatttaactttgctatccttgaaagtgctaaatttgaggcttttttttttttgagatgaagtctcactcttgtaccccaggctggagtgcgatggcacgatcttggctcactgcaacctctgcctccggggttcaagcgattctcctgccttggccacccaagtagctgggattacaggtgcccgcccgctaccatgtccagctaattttttatatttttagtagagacggggtttcaccatgttggccaggctggtctcgaactcctgacctcaggtgatccacctgtctcggcctcccaaagtgctgggattacaggcgtgagccaccgcacttggcaaatttgaggctttcaactcctgtcttttctgttactgttgaggcactgagtccctctctaagtggattagttataacttcatgacaataaggtggctggctgtctcatgtagggaaaatgagatctctttcttgggattttcttactgaacaaaagtttgaccatttttactagtctctgacagatggcttcctatagttctggttaagatgacgtacttaaagttctctagagattagtctgatatatgtatacatggtgccaatgatttttttttcaatgcagtcagtttttctaatctctcccttttttattctttttttctttttggtggggggcaggtaatgaaagcatgggatgctcatgtgacagcagtttgctcccaagatgccagtgaacttgtaaggaagcttggtgcagacgatgtaattgattacaaatctggaagtgtggaagagcagttgaaatccttaaaaccgtatgtattagaacaatgttcacactgggagtgggaacaaggacagttgattatgcaggtctgagatggcttggtggctttacaatcatgttggaatcttgagaaggatctatgaaaacattccatgtcactagaagttacttaggttggcttctgttttaattccagatgttaatacaacacagtaacagcatgtggataggcactgaggaagttattttgcttacatggtctttgctaatttttaagttagcatgctggtttgtaagaggcctgaagacaaaattggaaatgtgttcccttctgtggcatctgtcaccacaggaagaatatagagtagttcatgaaatacatgattagcccaaaacatactttcgtgttttggcttaaaaaaggcttaagagaaacagtgtaagtctaaatcttggtaatgggagcactgtggatgttcccagtgtgtctgaatgccaggctgtggtttggcctgaggtaccaagcaggaatgcattcargaattctcttgggtcatgttgattctgactgtgactccagcttattcatctgacctttatccagccaagaccaagctgaagctgagagcagaaatgagragtatttggaaagctattttactgcttctgtttaaaaggttttcccttttttgattagttttcagaagtcaactactcttgaccacattgagtagaagtatatttttaaagagaaagaaaaaagaaaaaaaagggagtccttatctgacaccgcccagcctttctcagccagtgccaccaacttctagcagtagtttggtggtgcacccagcagcagccagccaactcatcattccttcaactgttcagggagcttctactcttgccaggcagggttccaaacaccagctacagtggtgaaccagacaaatgcccactttcatggagcttacattcttgtttrggcggttttagtggtaggtgctctgaaaaaaaatgaaagggaatagatagggaggaggctgttataaatagcaaggttaaagaatgcctcactgaggaagcaacatttgagtggaggctttagtgagcaagtcaaatgaatgggatttgtgtgtttgtgtgttgctccctgctgtatccctccagctggaagagtgtagtagcatgtagtaggtgcttaataatatttatttaattattgagggaatctaggagaacaattgttccagctggaaagaacagcaacctaaagctcccatgtccggaacatgcctggcatgtttaaggactaacattgtccctttcagagattttgtcagctaccgtcttgtctgtgtgtcagggcctaagcctctttgggcgccttgagagtgacgacatgacaggtctctgagatctggcttctagaaagcagtagtttaggttgatcttgtatcttttttttttttttttttttgagatggattctcactctgtcgcccaggctggagtgcagtggcacgatcttggctcactgcaacctctgccttccggtttcaagtgattttcctgcctcagccccccaagtagctgggattacaggtgtgcgccaccacgcctggctaatttttgtatttttagtagagatggggtttcaccatgttggccaggctggtctcgaactcctgaccccgtgatccacctgtctcggccttgcaaagtgctgggattacaggcgtgagccaccgcgcccagcccgatcttgtatcttctgatgcttctaggaatagcaacatgatactggggccaagttctacccattcccctctatctaccttaaggggttttgttttgtttttttgtatttgtttttgtttgagatgaagtctcactctgttgcccaggctggagtgcaatggcgtgatcttggcacaacctctgcctcctggattcaagtgattcttgtgcctcagcctcctgagtagctgggattacaggcacccaccatcacacccggctaatttttcaattttttttttgtggagatagtttcaccatgttggccgggctggtcttgaacccctggcctcaggtgatccgccttccttggtctcccaaagtgctgggattacaggcatgagccactgcacctggcctaccttaagttttatacatgtctggaatttgtcaccagagagtaggagaacttgacagacggaaggctagaggacactcagtctaggctcccaaagcggtgctatgcttccctccttggcatctcttcctggcaagtggtcttgctcctttcgcttgtacttttctagtagggggaacttcgtgacttataaatgcatgccgttactacttcttttctttgatagctttagttaaaattgatctttgtaatttctgcctggagtttgacctctcagtctacctaggataaatatgttcctccttccaaatagcagctttttagrtatttgaatcttagagttttatagcaagaaggggctttgaaatccttcagtccaaccctatgatgctgtagttgagaaagtgaagggcagaggagttatgagtttttgcatacttgaggtcatgccaccagtcatttgttgggagagctggatccacaacctggtctccagatttctttctcagacaatgcctgttctataataccaggctgcccttaagttttctttaagttaagtatcctcagatttgttcattcaaaacttggaaatgaagtagacacttttttagtgaaaagaatggtcatctattaaggtcatcatgctcctgcatttcatatccttagattttaattgccttttttcttcttcttcttcctcttcctcttcttcctcttcctcctcctcctcctcttcttcttctctttcttcttctccttcttcttctccttctcctcctccttctcctcctcctccctccctcctcctccctcctcctccctcctccccctccctcctcctcctccctcctcctcctcctccaccgcctcctcctccttcctcttcctcttcctcttcttcttcttcctcttcttcctcttcttcttctgagtttcgctcttgttgcccaggctggagtgcaatggcatgacctcggctcaccacaacctctgcctcccaggttcaagcgattctcctgcctcagcctcttgagtagttgggattacaggcatgtgccaccacatctggctaattttgcagttttaatagagacagggtttctccatgttggtcaggctggtctcgaactcctgacctcaggtgatccacccgactcggcctcccaaagtcctgggattacaggcatgagccactgcacccggccttgcccttctttattttagttctataagatactcaagatccacaaagttggccaaagtggttttaggaactttaatgtttgacatcatccagatgaatttgggagaaaagatttaccaaaaaggaattcatcaactgatttgctcagtttatttgcatgtattctctatatagatctttgttttcaaaattatttcaaagcttatttttatcccttttcaatagaatatagtgattacagaagttttagtttagatgtaagaagttgaatatctgtcagtttctgtggattccattatggctgaatttttttggcatgttagaacaggctgttcatttctccttttgcattgtcctgatgctgtacctgaaaccaaatgatagaaaatttcagaaggtgaagaggatgcttccatgagcatttctgactgtaaagagaataaaagcaaatcattcttgtaggtgaaaatctcatactttactttcaagtatccatgtgcactaaagaatactttatagagaatggaaagctttgcagttttttacaaagcttaattaagtcagactttctcaaccttggcaaccttagtttctcaactatcgacattttgggctggaaaattttttagcttgtgaggggctattctgtgcattgtagtgagccaaaaccactctcttttcagaactacttgctgaagccattctaaagtactagaaaatgaaatgattttatgacaaaaattagtcacattaaacttaccttggagaaaagtcatagatccagtgaatgagtatgtccttccatctccatcaaagcagccacccctctgcaggatggcgaggtgcagcacagtttaagatttgtcactgaaataaaccctaagccaactggtactggaagggaaggaggatcagagtccagtgtaaagcctgacaaccatgttttgatttggttcttcctctccagatttgattttatccttgataatgttggcggatccactgaaacatgggctccagattttctcaagaaatggtcaggagccacctatgtgactttggtgactcctttcctcctgaacatggaccgattgggcatagcagatggcatgttgcagacaggagtcactgtaggttcaaaggcattaaaggtaggaagaagggtcttggttggtgactgcaggcagcctcctgctgctagaaattggtttcccacctagccagtttctcttctcttggaggccgcatagcacrgtggttgcaagcatggactctgcagtcacagtgactggcttcaaaatctgacctctacttagtagctgtgtaaccctgtgcaagttactgaatgtctctaagccccaatgtcttcccctgtaaaatgaggctgttaatagatctaccttactgcattgttgtaaggatcaaatgaagtagtccatatggagacatggcataatgcctagtacataaaaagcccttattaaatgttgcctttattattacttattgcctctcttgattacatctgatgtactgtctgtgcttccttcttgtctctacctgatgaccctctctctgtttcatgtcttaacacttaaagtctcttgtatataaagatgaaaacttacagctgctgttttcattgtattgggatagaccagtgattcccagactggggctttcagacatttagaggtctatgagtaaaacaagttgtayttttacttgagtaagcctccactcatgcctctgctgggattgtatcaacttgttctaacactgtgtattccgtgtaaatttgaaactccagctattaatgkcatgatgggagtttctgggacttggttagtcagcctgactcagaaacagggccacttttaccagggctgtatggagctcaaaactgaatacatctcacccaaattgcacacatcggtgagtggcgggccttggagactagggcagatgagcctcagttacaagactaatagcagagcttgagcgtctgctctctactttacctcgtagcctgttgtcatcacagtggggagagaggcttttataatttcatgggataaactggtggtaattatagatcattggtttaaaatatgaattgatgttaaaatggaatacatgatagaaaaaataaagataggctgggcacggtgtcttatgcctgtaatcccatcattttgggaggtggagatgggaggattgcttaagtctgagaagtttaaaaccagcctgggcaacatagtgagagcttatctctacaaaacaataaaaaaatttgccaggtatgttggtgtatacctgtagttcagctgctcaggaggctgaggccagaggatggtttgagtctgggagacagagggtgtgagccatgatcgtgccactgtactgcagcctgggcaacagaggaagacgttgtctcaaaaaaaaaacaaattctatttttttaaattaagcaaaatacttgagactctggaacaaggcagtagaaagttcctcagtggtaaaaaggctgtgagtcgctgtgtcagtccgaccaacgctgacccacgtttgtgagatgactggcttgataattatctttagcattttatttattccagatattaatttgggaccttttatggggatgaaacttaggactttggtctcttgaattctgtgtactaagtacttagaggtcgtaacaaagagctatgatggaggagaccacgactcaattcttatgaaatattatgggtaatagaaatgaacaaaccaagcgctgcactgtggtgttctttattttcatttgattcagacagtagccagaaacagtgtccacagggtactttgtggagaaagggctcttagctgtcccttgtctcttctttctctttcacaaaacccagattttccagtgctttaaaatgtaagtttaagttttctgtaagatttcagtttgtactccagtgagacctcttacaagttaaccttcagagttgtcctcggagagtaaaacaggcacagctctcttcattctcttttcctcctacttgaaagatgatagtggtaatctcatgtgaaaaccttttaagtagttttcaatgtctttctgattgtgcacgtagttaaagcctcattgtcatgcttctgactctcctacctgctttggtttactttctctcctatagtggcctgggtagggggggaataacacagacctcttatagcagaatattaaaattctgctattacagaccaaaagtttcactttacagagccacatgctgtgaagagttacagatgtggcagttgtgaccatttctgttccttctttaataccctaaacaattaccagaatgttttaattgcagtctatgaagccagaccttagggaaaagtatttgaacagatcttctgtgattgtcatttactggatccacagtaagcttgggacattctcagtgcttctggcatttagccacataattcttcaaacagcttttttctttttcttgttttgtagagacagagtcttgctgtgttgcctaagctactcttgaactcctagcctcaagcaatcctcccaccttggtctcccaaagtgttgggattataggtgtgagccagtgtgcctggcctcttctttttaagttagttgcataaaccagtgcatctcaacatctttcatgccatgacagacatagaaaatgatagtatttgaacagcatgtagaggctgccttgggtaatagagatgaacaaaccaagccctactcctctaagaccagcctatctggagacttctaccagccctggctttgcctggctatgctgagggctaaggggagtcaatatctcatcacaccaattctagagtaagcttgactctctttatatctgtagtcctagggtaattattaatgatgaatcctttagctctcacaggttttctgggttagacgataatctatagggtcactcacccagtaagccatcctggcacacccagtgggaagctttgcctaggcaactgcttagttttttctttctttccacattcttaaactgaattggtattgtctcagtctttcctcagtaagtttcacttttagcactggacaagtattgatagaatactttctatgtgtgaggcattttgtattcattctcatttaatccttccaacaatcctgcaagctaggtggtggtaccaccattctacaggaaatgggctgaaagaggtagcctgacaaaaataacataactaaaaaaaacaacaaaacaaaaataatgcaactagtaagtgctgttgtagggggtttccattgcatttttcagcctcacgccatggtagtagcttatatcatactgagtgtaagctcaatggcaaagaagtctgagctcacctcgcagttgtgggtagttgtggagagggcagcactgtggtactggctgaccctctgctacctcacattgctcccatctgatgaaggtttggttgggcaggtcattgaggtatcatggagaacctcagctcgtttgctgtttccgtaatggcctaccctacctttgacataaagaataacaattacagccaggcacagtggctcacgcctgtaatcctagcactttgggaggctgaggtgagaggattgcttgagaccaggagttcaaaaccaacctgggcaacatagcaagaccctttctcaattaaataaacaaagaataacatttataagtggcagtagagtggtcatgaaccctcttggtgtaagatttgtactcatcttcatttggagggtattgccctgtaatagatgagatggctttgtatttgccataaccatagggaaagattcagccgtgatgtataaggaactttgcactttgttttccctttaaagccactttattcctgtcagagccagaaaaaaaaattgtgattgggcttcttgtctaagatcatattttggtgacttattgtccccaaaacatttttgaatttggtgaaaacctcttttctagtgcctctgggctttattcaaaccttagtagggaaagcctagaggtctcagcccgattcctcatggggaggaaacccactgtggaaaaccatttagatgatcattttaaggaaagctttcctgtgcttacttgttcttcagttacagtttagagaaggagcctgagtgacatggatatgtctttgttcagttatttatttattaaacatttatggagcatccattctctgtcagtcattgtgccaaggtgctgtgcacacattttgtcagcatgaaatgagaaatcagtttgttgtagtcatccagaaaatgcttttccctaaatctgcatttagtcagattttatgtttttctgtatttgacatgttttgttttcttctttttagcatttctggaaaggagtccattatcgctgggcatttttcatggccagtggcccatgtttagatgacattgcagaactggtggatgcgggaaaggtacgtgcacctggaaacctggattggaagcctttgtatttctacagcacctcctgtagacctgcccactgagcctcgttagtagggactctacagaggtagcctgctcacctgaccttgtgctgccttacatggccaagtttacatgctatgtctttggttctgtctccatgggaggcatagacacagactgctccatctgcacaagagcttctctcatctagtcaaaccgccttggtttagtagatgaagaggcgggcccagggaggttataggattcccccaaagacacttggttaggtcatagcacagctgtgatctacattgggctgctaatattttatcaggtccccaggtctcctgatttctaggtgggtataataaaatcaagggcaaataaatagtccatctgagacagtcagtggccagggctagggtgagtgaggattgatggggatttgggtgaagacaactggctggtgtactctgcctactagtgtctgtcctgccgtggactctgtgggaaagggrctgttgcttatcatctggtcatcgttttttggatgtcaaaaggtctttcagggattctggggattgaaagcctcctcagctgccacctgcttatttgggtttttacatggtctaaaccaccttgacatcccatctctagaggaataacccagaaggtggtattctggtgctgatattttttatgttattgagagattatatggacttataggatggagaacttttagagggttgtgtgagatcatagatagggtgattctcattttacaggtgaaaaagccaacttgccaagaaaaaggggcatgctcaaacttgcagaaatggaaccaaaactcttgtgcttttccctctccacctttcagctgtattcttagtgcttgaagctgatttgagacttcagcatacattgtcttatctttgtcactttgcagtgggcagggactggagttagagcaggctagcattagcattgtgtgaaccactctgagacacttggacagagcccctggaggtgggctttcttattctggcccctgctccttgctggcatatttcatctttccgtttcgattttggaaaggaatatttttgggaactaatggctgctttttatgtatttaaggtttttcttctttcacagccaaggaactatataagaggatggcctgttattatttcccaaatatttgggttccaggcttatgtgtcttttcatggacttctaagttttggtgtgttctgatagggacaggggctcagtgttattgtgactgtgtaactcctcctttgtggggttctcccacatcccacaggaatgcttattttatttctaggaagaagagaatgaagtatcatcaagtaagtgcttcatgtggttggaaccctattattagagaggtctttgtcctctagaagtccacgattgtgcttgtcctgctatctgctccaggctgtccacatgcttaccactgctcttttgtattcaaaatattgtgactctctctctgcctggaaattactgtttacccaacagagatgagaggtgacttgtatatatctacctattacatttggcagataactggtaatggctaaaataggacatgataaacaacaacaaaaaaagatgtccttgaagtattctccaaggaggttgagtgagcaaatgtgccttgtgctttgattctcctctcctgcacaagctgtttgggcttgggagtcatttctggcaatgaggggttctgggactgtgaagttggtatgtggcactggatgccttgatgaggccagctctcttgtcgtgtccttgcttctgtgtggatgtgagaggtcattgcctttttatcctgggaaattagaaggaatgacacagcagatcttacttatgtgttgtgtggttggtagagatttgttaaattggaggaggacatttaaattcttccaagctttggctgagcgcttcatgattctcattagcaggtaactgttagaaaagctacagttgttttttgatcgtgaaaagctgtgaaacaacagagccaactcttttaaaatacttgaactttgaaaaaatacattcataaggttcaaaaaccctaaagatggaaaaagttatttcaagaagtcttcttttgactgctatatctcagtcactgagattctgcttgtcagatgcaaccaatattactagtttcttgggtattccaaagatactctatcaaaacaggaaaaataatttttttcctctctctctcttctttctctcctaacaaaatggataacatactgtgctgcaacctgctttttttttttttttaacagcatatgttcaaatttgttttatgtcaggatataaaagctttctcattccttttttgttaacagctacatagtatttgtatgggtgtaccataatttgtttaatttcagtcttttgcaaacagtgcttcagtggataacccaatatttatgtttagtacctaattgtatatataaccatttctgtttatggaaatggaattgctgagtcaaaagagatatgcatttataattttgatcgtttttttttttttttctttgagacagagtcttgctctgtcgccgaggctggagtgcagtggtgtgatctcagctcactgcaacctccacttcccgggtacaagcgattctcctgcctcagcctcctgagtagctgggattacaggtgcccaccaccacacctggctaatttttgtatttttagtagagatggggtttcgccctgttggctgtactggtcttgaactcctgacctcaratgatccacctgccttggcctcccaaagtrctgggattacagacatgagccactgcacttagcctttaatagatattaaaatagacagcttttgaaaatctagtatatatatttagtgtctggaatttatcttgtggcctaccttctaggccccttctctctttacttacccattatcttaccctctgaaccattttacttcattagagacttgtttttaagaatgtgaagaaggtctggttactggtcacttgtgatttaaactatctttttttttttttttttttgagacagagtcttgctctgtcgcccaggctggagtgcagtggcgcgatctcagctcactgcaagctccgcctcccgggttcacaccattctcctgcctcagccttccaagtagctgggactacaggcgcccgccaccatgcccggctaattttttgtatctttagtagagatggggtttcaccgtgttagccaggatggtttcgatttcctgacctcatgatccacccacttcagcctcccaaagtgttgggattacaggcgtgagccactgcgcccggcctaaactatcttaatatctgagctgggcgtggtggctcatgcctgtgatcccagctacttaaaagtttgaggtgggaggatcgcttgggcccaggagttcaagaccagcctgggcaacatagggcaatcccatctcaaggaaaaaaaaaaaagaatctggattaatgagtattactgatagagtctaaattctgcttgttagccctgcatgccccagtaaaaatggagaagccaccgagttaatatccacartaatgagcactctctgtcaatctgttaatagcattgtccttctaccttctttatgaacaacaaccctacctttgccttctcccagtgcagcactcagtaaatgttttggtttcctgcctttaatgtgctcactattgtcaggctcaaaagtgaagaggagctgaaatttcctaaatatgtggtgacctcacagtctgtttttcctggagatccagtcttaggcattgttttcacatgactgtcatcacgaagccttattgcaagtcgtaggactccatattcatcctatctgggcacaatttcagtttgaattttaagttacctagtattttcattatgtcttagataaagtggttggcaaactacagcctgtgggccacattcaatctgaggcctgtttttgcacatcctctgagccaagaatggtttttacttttttttttttttgagatgtagtcttgctctgtcaccatgctggagtgcagtggcacgatctcggctcactgcaacctccatctcctgggttcaagcgattcttctgcctcagcctcctgagtagctgggactacaggcgcctgccaccacgcccggctaattttttgcatttttagtagagacagggtttcaccatgttggccaggctggtctcaatctcttgacctcgtgatccacccaccttggcctcccaatgtgctgggattacaggcgtgagccaccacgcccagctggtttttatatttttaaagatttgttaaaaaaaaaaaaaagaagaagaagaagaacttagaccatgtgaagcctgcaaagcctaagacattcactatttaggcctttacagaaaaagtttgccgatccttatcttaaactagaagttaaatgttttttaactgaaacccagtcaggccaagctccagtttacagaataggcagaggaggagctgctctgctggtgaaatggtggcagggagtgacctccccgacaaatgttctttccccgcagctgctccacacagccaaggagccctgggctcttggacactagtttgcaaactgctgttctgggcattctcaaaaagaatgatttataattatccccttaagcgtactgggttggtactgacgtgcctcatgcctacagtttattggcattttctcctaagcacaaaaaacagttcctgttttcatactatttaacacacttactttttggtgggaggagatatagcaaaaattctattcaggtcacgcatatgccattgaatagcatactcacagactggaaagaggaaagctttgcacttgtctagtttactgtcttcatccctttatccctcatcctgctgtgatgtcacatttgaagggacagaggccctaagaaattaaatgatgtgttcaaggtcacataggcagggcccaggtctcttgacccttacgacagttccttctacagtcttcattgttttctgcttaaataatcatccagacattgttacctagagtttgagttcttggtattttactctgtcatcttgtatttctcagtatcttgcaggactgagaggaggtggtggtgaggcagtcttcagatgatacctgctgctaagaaggactgtgtaactgtgttttgaaggaaaatattkatacatatttgcttatatatgcatgcattagtttcctattgcagtaacaaattactatgaatgtggtggcttaagacagcacaaatttattatcttataataataagattttggtcagaagtccaaatgtatgggcagggctgcattcctcctggaagcaggctatacgggaggatctgtttccttgccttctccagcttctagaggctgtacctcccttgacttgtggctacatcactccaacctctgcttctgttaatctttgacctctaaccctcctgccttccccttataaggaccctgagattacactgggcccacttggataatccaggataatctctgcatctcaggatccttaacttaatcacaccagcaaagtccttttgccatgtaaggtgccatattcacacattttgggaatcaggatgtgaacatctttgggggccattattctgcctaccacaatgcataaaatacttcaaaaaggwtatgagagcaactagaaaccttggttgctcckgaggtgggaaaccagatggctagaaatcaagtatgggaggaagatctttttttttttttttttttttttttttgagacagggtctcactttgtcacccaggctggagtrtagtggtgtgatctcacctcgctgcagccttgacctcctgggctgaagtgatcctcccacctcagccccccatatagcactacccagcactacctcttggacaggaatgcccctgaccagctaaattttttgtattttttgtagagacaaggttttgccatgttgcccaagctggtcttgaactcctgagctcaggcaatctgcctgcctgggcttcccaaagtgctaagattataggtgtgagccactgcacacggccaggaagatatttttgaatgtttattgatacatgtatattcttcatctaattagtaagccttctgatgttaggagcttaatgttcacaggtatattcaaaatcttagatgccagccaagcatcttggttgaacagtgatatagatttctcagttgatttattttagccagcatcagaatagttcttatgcaccatatttgagttcaattcagaacacttactgaaggcccactatcacttacttgacccagtagatggtggagaaatgtgttggtcacactcagttaccttttgagcagcctgtcctctagaactttgtgcagtgatagagatgttctctgtctgcagtattcacttggtggccactaagccactgagcacttgaaatgtagcaartgcaacttgagagactgactttttcattttatttacttacttttgattaacgtaaatagtcacgtgtctagaggctaccatattggacactgcagctttcgagaaaaatgtaatgagttctgaggtaggtgatttcccaggtccgtcttgaatagctgggccctcgtttagcaacgaagtacattctaaaccttaagttctttattgccactggattttgctccatagaaagaatgtagtgattagggactgaatccctaggaccactggaagagggctgccttgcctgatgtggcaagtatctcatggatcccatggcctcaatgcttctgaggtttttctgatgctactgaaattgtttctatgaggaaatttatatggggtttctcctctcaccttctggctgttggaagtgcattttttaggggtacctagggacaagtccttgatgctttcccaaatggcacacttactcccttggagagttcccccatctgccatccccctcctgtctcaccccatcttccagttttgagtttgccatctggggcaggaagtttccgagaaacagcaactgagagcaaaattcacctcttccttttgtcttctttttgtctaaaggtagactgagtttaagtccccttcttcccctttaccccaacccaggaaatactgaacctttcacagaggtcaggggcatacctgtccaggaggtagtgctggaactgcggtcctggtgcctgtccacaggtgtgtggatttggactcagaccaggagcccttaggtcttccttggtgtttgtcacctgtcagtgtcccctcacacacctcaccctctgagatctgcagcctctgtgcctggtggaagaagaggccaagggtctaggaaaagaagtggaatagactgtgacttcccagattacatccattccatgcagtaatgacattaggagtcctgggtccttgttttggctctgctattgacagctctgaccttgcacttaccactcaatcatttgcacttcagtttcctaatctatcaaaagaggcccactcggatatgttaactctactgttttgtgattctcactgggaaaacgggaattgagggaaaacctctgcctgctgccatggctgcctagacagtgtccttctccaccagcagcttcatgctcttgcagtagtgagaggttttctgtaccgtcttccgaagcctcaagtgttagagagggtttttgcctcagcaggaaggaggacttgcctagcgtcttgtaagcagcaatattccaaggccacatccagagaggttaaggttcccgtcgtccctacgttctcacagaagtgatgtcaggcagcgggtgccaaatcttggggcttggcttggttcagcctttgtatcagggatgcgaggcacaatcagcaccccacacatgaatccaagactgaatgagggctgctgctgtgagcgtccctggccggctgtgagcctcgtgtgtctgcgcagtgggaagcatggtgttgagcctgcccgctttataacagggctccctgtgccaggtggactatagcagcgtcatcacataaacatccctacttcactgtgagtaacctttctttcccccctctgtattttaactctgatccctttgtccttaacaaacaagtattctaggcctgatgtgaggctgtacatagacactgtctcattatccagttaatctctgtttgctgtcacagattcagccagcagtggcatttgcctgccttcaatttgaaacctttttttccattgtcacttacgggaattgctgaatgactcattgtgccgtggtcagccctctcgggttatttgccacaataggcctgaccagccagattaaagtgggcagtaactgtaagctgcctgtgtcatcagttcaggatctgtgtccccggtcagagctctaaattgaacattcagttcagccggttttggtttagtgccttaggaggcaggcactttgtcagtctgtggaatggatgggtatgtgcatggtacaagttagggattccaggaataaggcaaagggctgggtgagtcccactttagggtgcatacagatcactggggaagcatttttctgccccaccccctacaggttctgatgtagttgttctaacaggaggccttggactctgcattttaggcatgcattcaggtgattccttttccaggtaaacagcatcctgaaaacagcatcccaggggctttggaggagtgataggttcaggtttcatgtgggacatacaggaaacaactggtttttttttttttggagacagagtctcgctctgttgcccaggctggagtgcagtggcgcgatctcagttcactgcaacctccacctcccgggttcaagtaattctcatgcctcagcctcccgagtagctgggattacagacacacaccaccacacccagctaatttttgtatttttagtggagataggtttcaccatgttggccaggctgtctcaaactcctgacctcaggtgattcgcctgcctcggcttcccaaagtgctgggattacagatgtgagccactgcrctgggccgagaaacatcaatgcattccattctgcaacattaatgcagtccaccctaaagtgggactcaccacagccctctgccttattcttggagagaatagaagacaaataggcttcgtctcacaagccagctcagagcagttaatagtggctgcagtggtgaagattctgaggtcatgctcagcttgtgggggatcagcaatagtgatgtcctccataggcgtggatggcacccgtgtagcacacatctgtcatcttggtggcctggacacagggtcgagagaccaggtcctcagctggcacaaggaaggcaggccaacatgcaggctgtgataaatccttacagtccttggctacctttcccttcctttaaggttttaggggtaggtgtagacagcagcagatgctataggaaaggctcagtgcataatggtgatagcagatgatggcatcagattgaatcctgacttgctatttatcagaagtgtgacatagggcaacttatttaactctgttccttgatttattcatctgtaaaatgggaataacagtatttaccccagaaaatggttatggggattaaatgagatgaaatctctagagcccctaaaacagtgcctggcacatagtgaggccagtatgtgccagctgttgcttttattatgagcttattgtgatttgtgggtacaaaagtattttcagctctttggagaagggaacttttggagtctaagatgctcttctggtggcttggctgtgaaattcatccaagaggaagtttcatcagatgcatctgaatgtcacgaaaacacttcttcctcttgtaaaaggaaagcgtaaaatgtatgagttggcttatgccttctgataacttatgcctgccagtggagctatgggaggcaggccactgagatacctggtggataactattgatttttgcttaaagttttgaaaaggaagaattcagttggatttttgcatggagaggatgttacctgggacctagtttcagaaggaggttgctggcattactgatagtacagtgaaaagacccagcagcattgaaacatttatgagctggctggaatgactttcttgtaaattgtaaccggctgcaccgttgtttagcaaagcctgccagggcagctccagcctgggccaagtattctcgaagcccagaaagctcacatgaggtgcgtttttcccacttaccttattagctttcacctaagtgacattgatgaagctcctactgtatgtctagcattatgcctggtgttgtgggggatgcaaacaaaatggcttagtcccctatcccacaagtactttatgctctggttgggtagatatgccaaacacttaacaaattaaaaacaaagaaaaaacaaaaaaaaaactatttccatgcactctctgtaaggagccaaatggatacatacagcaaggaccttgggatgttctctttggtatttaccacacagcacagagtggctgagatgtgtactcagctgtaacaagtacagtctgtgaggaaggccacatggttcctgtgggagttgaaagggacaacacgttgcaaactggggcatgaggacacacagtgtgagacctgggcgggaagggcagtggaattttcagagaaggatttctgggcttactgactcgtaccagcagaggcataaacataccacgtggagaaaatggcaggtagagcgtttttgcaaagcatggaatctggatgagggctgagctcaggatgctattggtcttcgaatgccggagtgggagctgttgaacggttctaagtaggagagtgaaagaccagcatggaggagaagtaagactgggcagtggggtgggaggggccataaagagagaagcagcagtgaggcaggagtggaggcagcatcatggcccttgtgagagcctgacctgggtccactggagagacacttgagagagactgtggcttgagggacaccgtcaagaaactaattagcaatgtcatctgccttgaaagatgtaggcttttttatccaccggtcaacctcttatgttttacagatccggccagttattgaacaaacctttcctttttctaaagttccagaagccttcctgaaggtggaaagaggacacgcacgaggaaagactgtaattaatgttgtttaaataaaaatgcagtttagtgattgttgacgttcttatttggtgagtgcctgtgagcccaaatttttttctagccatccctttcaaacatttttccagattagattatacattccatgatacaagctttaaaaaataaacacaccattttggccagtaattgatataaaaatatcagcacttggatttgtctgtagtcagtagaaattcgaagttttttcaagctgttccttcacactggctttgcaggttgttgtggcaccttctgttttactagcttaaactactttattgtcttttttgttttagagacagggtctcgctgtgtcacccaggctggagtgcagtggcacaatcacagctcactgcagccttgaccttaagcgattctcctgcttcagcctctcaagtaggtaggactacaggtatgcatcaccacacccagctagtttttttgtatttttagtagagacagttttgccatgttgcccaggctggtctcaaactcctgggcttaagtgatccaccatgtcagtctcccaaagttctgggattacaggcgtgaaccaccctgctgggcctgatcgtcttaatgtacaatactaaaactttcagtgtatagatggatgttggcatgaagagataatttaaagctggttccttcttgaattcatcactgagcagctttctaactgccaaggtttccttttttgttcctccaccataatgtggtcaccacagctcttaaagttctaaatctcttagtgtcatatataaaaatctgcctggtgattcatttgtttatgctcttaatattgaaaggtgagagcagagtttctaactttttaaaacccttacatcttgcataaggattaggcctgtttcggcaattgaaacatgcttctctgagggcttttccatggaaattgcagccttccaatggagcccaaagcttgccactttgatgtcaaatgtttacatttagatatctctccaatcaacccattgcagtgtgcacttcgaatattcatttacggtaagtgtttttacttcctaatatactcatcctcagtattgcacctgatatgcttgcttgtaacttttgatgtagacctgttttgagatttctgcttggtttattcctgttagacactcgtttggtagcatgtatgttagatgtaggcttttctctaaaattgttggtctggtcttactaccgagttattgcaaaagaaaaaaaaatctgattttccaggtgtaaataccagctgctcttgacttccatctggagcagcctcagctcttttcctggagggctcccaggtggtagtgggagtaaaatacttgagccaggacctcactcatcctcgtttccactcagaaactatggagtttggaaagagagtggtcagcaaatctttcttgctattataccagcacccctcaaacctgcttcatcctaatcagacatttgtttctaatctgctagctgactctctttgaagggtgagatgagggctactgaatggactctcagatttcatcaacatagttaaccagaagcaagtttatttaagagatcagttcagcacaggctactgtagaatgtcttaccccaccatattgtaatggtatgcacaaaaggcctaaaatcagagctatatatctaggaacaagacagatatgttggatgctgttgtacatgcaccaataatatttkaaaacaagacaaactattccagtgaccataattgcctaccatagactccagagaagatcagcattttagaattagaaacacacttgaatagatggaaaagaaacaagctgttctacctgtgacaagagcaccagtattgagtgatgaggacaaaaagaggaagaatatattcaaggaaatgtttagcacttttgttcaaagctagaacccactgttggaagagcagcgtatgggctggtgtcttgtcagttgttaagcagtttgtttgcattttgaaatgcttactgcagttgaggattccaagattgcttgaagattgatttgactccggtcaaatcaagacttgaccagcaacatccctaaaggtctcttttccttcactttctggggataattaattgctggtcatcctcttgagcctttcacacctcgtttagtggctatagtgcccccaagacctgaggctgtccaccaacagctataccctgaagcatggctgcagaacactgcagggaaggcagccccatgcaggccatgtgtggatgcaggyggataggaggacaagaaattaggctaaaaaatctgagtttagcaaaaaagtatgtaacattgcttcagcacttgtagatgagtaaggatggctcataaattaggtcataatagtgttccagtagcagctataagaaaggcattaaacaaccctcatttgtgacattctagggcagcccatggatgagttaaaataattcaaatcctggctgggcgcagtggctcaggcctgtaatcccagcattttgggaggccgaggcgagtgaattgcttgagcccagaggttcgagatcagcctgggcaacgtgatgaaaccccatctctacaaaaaaaaaacaaaatttggctgggcttggtgatgtgtgcctatagtcccagctacttgggaggctgaggtgggaggatcacctgagcctggggaggtagaggctgcagtgagccgtgattgtgccactgcactccagcctgagatcctgtctcaaaaaataataactcaaatcctactaacaaatgttaccagactttgacattaaatttttaaaatgtattaatttttaatatgaactaaaggaaaatagtattttgtttagagttccttaaatgtgtgaatacctaaggctttcccattgtgctatgcagcatatttaaaggttccagaaagtgtttaaggccaagaaccaaaattacaggcctaataaagtatttcttctcagatgctaaacagttctctacctttcaaacttaagcctttgtcttaccctttaaagtgtaagggctttgtaggtccacaaagttggtaaatttgttccagttctctcctgtcactatctttggaaataatttaaaatgtacacagtcttgaaatcttgatataacattttacaaaatcacccaaaagctgctaattaggcaacctgtttaagcagctaccaaaaatgaaaggcaagaaatgaaaggaggacaaattattggtttaaagctatgatagtcttttgaaacgatgagtaagttctctgagtcatggcagcatgatttaaggttgaatttagaatcaatgaaggaggagtcgatccactttccagtctggtcttccatcagcattgtcctttttaagaaataaggtggctggaaggacctccagaagattcttcttccttctttgttcaggtatataggaccatggcttcccacacttgtgtaaacttctctttgctgacagtgttgaggataatgtgattttgatcatactgtgtgccccctamaagaaaggaaaataataaaagatgaatgtacccatggtgaagggtctatagcagacacaattcccctaacaccagtacagcaaaagtaagcaagtaaacaaggtgtagaactgcatgcctcaaggaggcaaggcagggagggaagcctgggcccctgtgggatgagagggtcaacctgccatgggtgaatctgtccagatcccaccattggggcaccagcaccttcacacaggacatcccacctcacgggctcctttttctacccagttcttaagagctagtccacagtcactcttacaatgtctgaaattcaagggaactgggaaaacccgagagaagggaaaaggagtaaagagactaacatatatttggtggtgagatggtagattcgagacaccagcgaggaaagagcaggtagtcctggcagtggtggaaaggtgggaggaatggttatcgaggaacagcacttgcatgaacaatgaaaacgggctgtattaggtcaaaggggaggtttggatgacacccggaagtacataaggggacgcggtagcattgtcactactggggactcagttggtggataaaatttcatagcatttaggatgctgagtaccacagtattgtaaaactattatcatgaactctctccctgttaccagaatgtttgtaagattttccaaaggtgcttactggatgtttcagatactttagtgctaaaaacagcctcatggcttctttctttggagaagtatcattaacaaaagggttatctgatttttttttttccagtgtagaataaagatcccttcagatggcttatcctttttttagcataaacctcagcaccaaggatgtatcaacaaagaccccatcaaagtaaaaatctgtgcattttgatgcagggagtgactggtattgaaagcatgcttcctccttggatcaagaagaaataaacattcttttcacctttgaagcatttacaaaatatgaaaaaggtttgggaatttacacaataaatctaggtattatagttgaggaaggaaatcgtctcttctcttgtgagacactgatttatcatcattggtaatctacagcctctacacagctagatgtatggctagatgtactatagaatacaagggtaaggtgttttgggcctttatgtgtaagtttgtagcagtagggaaaaaactaccagcaaaccctacactctgccgagacagagacacacagcatactccactgaaatttcaggaagtattaaagtcacaatgtctcttttcattcttcattatagtatgttaaaatactttttgtattttaagagtatcttttgtattttaaaagtaaagtatcttaaaatactttcatataaattcaactagaatcatgaaaactagaaagttcttgagaaataatttgattcattctcttgcctttggagagtgtttaaattgtgcagacttcatgttttttaaagtgaacatgaatcagcttccactgttgttacaaggtatgtggtctggaataatacatgaatgtctaccaaaagaactcatttcccaaacacaagaagatgagctagaagacagatgcatgatctaataattcttagggcaattttaatagataacaaatggttcagtagttgtagctaatggaaatcatggtctgctagtaagtgcaccaacgagaagagacgtgtttatattttcctttgcatggggtgtgggacgtgcggcgctgctctctcatgtccacaagatggcaccattctcccagtctgagaaaattaaattcagtttaacaaggaattaagactgttgtagctagccgggcgtggtggcaggcacctgtaatcccagctactcaggaggctaaggcaggagaattgcttgaacccaggaggcggaggttgcagtgagccgagatcgtgtcattgcactccagcctggacgacagagtgagactccgtctcaaaaaaaaaaaaaaaaaaaaaaaaagactgttgttgctaccgtgctagatactgagatttcacaaatatacgggacattatgcttactcagcaggcacttgagtaatttatatagtgtcatttaggaaggggctctggagctttaaaaagaagtcttaagaaacctagagtcccacggttcatgtcagagccaagacaaggagtgaggtgtccttccttctggtccgctgctaatgtaacaagtcagggacatcctgtgtgcctagcgcatctagaacgtaaactgtctgaagccaaggaggaggcttttttttttttttttcacgctggtgccctccgtgtctagcaccgagcctggcacatagtgtgtaccccgtgaatacatgttgaaagaataagagaagaaagctctagctaaggatcatagtgttgtccaccctggacataggaagcagatcacatttgtaaaaaacaggaaggtttggtcagatttcctttgagaactacataccctactttctctaacattgtgtcaaaaactccattttttccaattgagtcacatttctttggtgtctctggagattttgaaactcttgtcaacactgaagcactctagtgcaataaagtttatcaaaataagaataaacaaagatctgcataattcttaactagtttgaacctcaggttgatcatctataaaatgagtatttcacctgtctacatattgacaaatctgttgtaccaaatgtaaggtgagggagctgtactatatgttactgtttggtttctgaatattgcatttattttcttatatccaag

SEQ ID NO: 96149 - DNA, 306214 bp, Homo sapiens
  misc_feature (1)...(306214): n = A,T,C or G
ccaggctggagtgcagtggcaagatctcagctcactctcttaaaatagagctaagcacttaaaatgctgtcttagtctgtttgctctgccataacaaaatacctgagattctggtattttataaagaacagaaacttatttcttatggttctggaggatgaaaagttcaagatcaaggtgccggcaggtttggtagtctggtgagagctgctgtttgcttgcaacatggtgccttgttggtgtgtcctccaaaggagaagttgaagcaagcctctatttatttaagaaggacctgaatctcattcacaagggaggaaccctcatgacctaatcacctcttcaaggactcactttttttcttttctttttttttttttgagacgaagtcttgctctgtcacccaggctggagtgcagtggcacaatctcggctctctgcaagctccgccgcccgggttcacccttttctcctgcctcagcctccagagtagctgggactactggcgcccgccaccacacctggctaatttttgtattttttagtagagatggggtttcaccgtattagccaggatggtctcaatctcctgacctcgtgatgcgcccacctcagcctcccaaagtgctgggattacaggcgtgagccacctcgcccagccaggactcacttcttaattccatcacattggccattaagtttcaactcctgaattttggaggggacacattcaaaccacagcacatgtctaccagtaagtatcaaagcagtaaaatgtttcaaacatagcttcctgatcaccaaatcatcaggaaagttttcaacaaataattggtttgtctgtggcaacacagccacatctgattgcatgtccctttcattgctccttagtgtacttttctaaatgtgattctgatgttctctcagtggtagttgacatgctgcttttcctgcatggtgttttgatggagatgctaactctaatttgggggatacaaatatcagtttttctttgtaaatattcatctgataattgtgagaaatgtgccttctatgaagtttgagtattaaaaacaaagtcattttattggaaaactacttactgaagagacatttgaagcatccctgtatttgtctgcttgggttaggaaggacgtgagatttctctctctctgtctctctctctctctttttttttttttaatgtttgcaaaaagcccctgcccatccccacatacacactgtatcataaactgccttttttgtaaagactcatgagaaaatttctctcctgtatcaatatcaggcaaaactctgatttgcccaagtcatttggtttctttctcatagaagaattaagaatcatgaacactggctgggcacagtggctcacgcctgtaatcccagcactttgggaggccgaggcaggcggatcacctgaggttgggagttcgagaccagcctgaccaacatggagaaaccccgcctctactaaaaatacaaaaattaactggtcatggtggtgcatgcctgtaatcccaggtactcgggaggctgaggcaagagaatcgcttgatcccaggaggcagaggttgcagtgagccgagattgcatcactgcactctagcctgggcaacgagagtgaaactctgcctcagaaaaaaaaaaaaaaaaagaatcatgaacactatggagcactttgaaatccatgattcttaatcttgactctgcagagctttgggggttccttcaagacctttacacatacctacaggagaaaggggtgaggcataaggctgtggctgggaaccctcacctcctttttccatactgaacttctatacatactagattttaaacaaaggaaagtttgaaagccactgatgtaactgatcacatttctgtccttgcagtggctgcctggaagctcagcatctaattctcagttctccactgacaagtgtccaggaccttctagctcacattttgtgtgcaaaccttaccttgactttcttttgttttctttcctgtttccctgttgtctgcttttcttgttttctttattctgctgccatatatatggttttatatgttgcctcaaatcctttttggaaagagccaaggtttaagtgaatgtattttaaaaaattgaatgctttttctgtagaggtgacctttgcaggtgggaaaggaatatgtttagaaaaaaggcatgatttgtagaattcacatgtgtgtttgtaggatatgtatatacatatcctacaatgaatatacatacattggatatattgtgaggttcatagttttcaaaattaatgtgtttttctggctttagagggcatttacttggaagactggagtgggggaaatgtgttttactccaaggtaggcatgactgtggactacaccacaaagaatctgctgtatggcttagcactttcaaattttgtttgggatcattttgctggttgttatcaaatgaggacaaatacttaacaaagagatagcaagggaagaaagagatagaaagggggtgcttctacataggaaggtggctgaattttcagggtcttgaattagcattgggggcttaagtcctatcagcttctgctcatctgctgtgactctgtggtcaaggtctcactctcccaaagatagggattctcttcctctgctgtatattggaatcacctagggagctttaaaaaaggatgatgccggccaagcacagtggctcacgcctgtaatcctagcactttgggaggccaagatgggtgggtcacctgaggtcaggagttcaagagcagcctggccaacatgaagaaaccttgtctccactaaaaatacaaaacttagctgggcgtggtggcgcatgcctgtaatcccagctacttgggaggctgaggcaggagaattgcttgaatccaggaggtgaaggttgcagtgagccaagatcacaccattgcactccagcctgggcgacagagtaaggctccttctcaaaaaaaaaaaaaaaaaaaaaaaaggcagatgccacagttccaccccagagtctggtttaattggtctaggatggggactcagcatggagatttttaaaagctctccctggagattctgtgcacccagagttgagaatcacagcgctaagagaaggaaaaataaaattaataagcacctgcctcctgcttatctctcagggtcgttggggtgtgtctgtaatttatgaaataatgggccagattctggggaaggaataaaatggtatgaaggaaatagattaaccctttgcattctatagggtacctttggttaacaagtgttcaagatttttccccatgagccacaggaagaaacatttcacatcctgaccaaagatatagatatagatatggatatagatatagatacagatacatgtgtgtatatatatatgtatgtatgtatacgtatatatgatatacgtatacatatatacatatatatctctccattgtaaattgaaaatatcctaagttcaaaatgcatttaatacgcctaacctactgaacatcatagctcagcctaacctaccttaaatgcactcagaacacttgcattacctcgcagttgggcaaaatcatctaatacaaagcctattttataatacagttttgaatatctcatgaaatttatcaaatattttgctgaaagtgaaaaatagaatggttgtatgggtatctcaattgtggtttctactgaatacacatcactttcacatcgtcataaagtcaaaaaaatcattaagtgaaaccatcataaattggggaccatatgtatacatttaactatatataggggatcatatgtatatatgtaactatatatgtataggtatgtatatatattcttactgcatacaattcacttgatatttcctattccagtctattcctttaggaaaaaaaaattaaggttcacaggccaagacaaattaaacacctctgaaggtcattaagatgctcaatttataatgacttggagcacttagcaaagatactatgggaagtgaagctgtgtgtacagtaataatatttgttgagcaattgctagtgccagctgcagtcatagtagaaagtgttttatgagcatgagctccatgaattttcacaataatagtataagatgagtactgttattttcactttagtgatgagaaaatcaaggccaagtacatatgtacattctgcctctagaagacagaagcagagccatctccaagcctactgcggcaggcccagagaagagaacaaccatgtttactgaatacatttgcttctgtctgaagtttggggagtagaaagcggagtaagctatgaccagaggtgggtctgggaatggtgaggcctgatacatgtataatttgcagcccctattcaagaaaaagagtacaaaattatgagtccaagattagataagaaaatgattatttctttaaattaagaaaagaaatcacaacaaattcaaattttaagaagctgaaaattaccacaaacatcacaaaattcccaactcaactttcctccaaaatgccagcagccacctgacaccaccctactcaagggcaagttgggggtggggaatcggagtggaaagacagcggtgtctacggcctgcagccaaatgtccaaagcaaaggacttttgtaaactttacatcaacaagccaccatctgaacacttttctaagtccccttagaaaggggtccaagcaagtcaggggcccaagaacttaaccttcatcagctcctgtaaacttacaactggaattgaagactgttacggctcaagagcaacggctttggagtcagccaggcctgaatttcattcctggctcagccactttctgccttctttgagcttggacctgctcatttgtgaaatgagtgtgctgacagcagctaccttggggtctctcttggggattacatgagataaggaagagttgggcattggatgagcttaaggttgcaaataaaaatataggacccccggttacattggaatttcggagacaaaagaaatactttttaaatataagtacgtacaaccaatcgcataagacatatactgcaactgattcctcgtttctctgaaattcaaattcacctgggtgccctgtcttttactgcacttaagaaatgacagtggttgatattgcttttggattgaagcatcctgggtgtcccacggtggaattcatagacattagagagtgggtgacgggctaggaaaggctgcatagactccaattaacacagttcattgccagggagactaaaaggggggtggctatgagaggatggagtaagtggggtgccttgatttgggcatgtaggtggagggggctatacctctcactttcactaaaccagttaagctcttgagacctcagtttccttagctgtaaaatgggtgaaacataggggagacccctgaaccgttctcacctaaataccacaccaatggcacttcctcataattcagatgtcacctcctcagagaggtcttccctgactgctctagctaaaattaccgcctctcctccactccccaacagcagatacatatattatttttctccctgtaactctaactttctgaaactgtcttgcttctttacttggttatttgtttatggtttgcctctccatgtgaatgcaagttccgggagggcagaaaactagtctgtcttgttctagctgagtctctcaggagtggtacctggcacagtagatgctcaatatattttgaatgaatgaatgggtggttgagtgaacgaatgttagtgtcactattgaggtcctctccgagccgtcgttcctttcacaggggtcatgcctgggttgcagggaggatgtgctgccccggggagggaggaggtgcggggtgtcggtgggtggggaggaggctgggccctggcctccaggaccggcgagagtgagcgcgctctgctcggctgcaggctcaggaagcggcgcggcggcacgtgctgggccagagccccgcgccctgcgtccagccgccgggtgtgtgcgcccgcgtagcccagcgtcgcgcctcggcgcccccacgcgcccacgcagcggcgcggggacccgggcgggggcagagggagggcccggcccagggaggagaaggggccggtcctcccggcgcaggcagcagccgcggcagcccaggaggcggaggcagcggcaacggcagagacagcaacgtgcccgccgcagtcagcccggcctcgtcggacccgcaccggcccgcccgcccgcccgcaccgcgtcggggcgccctctccactgcgcgcggtgagtaccgccagcggcgcccaccccaggccgcccgccgggattcgccgggcggggggagttgttcaccgggaccccctcgccctgcgcctctttctggcactcgccaagcggggcctccgcagctgtcgggacgttctggggcgcacgggcctcccagggccaggaaggcacaagggcagaggggacagcagcagagcccccctctggaaaggctctcccaggctcggggccccagtttccccatgcgctttggggcaacgaccctgaagtttgctctcccgcgcgcgggacaagtgcatggcgcgcaggcggtgtagacgcggctgggtccttggcgttttgttcgattatggtcccggcggttcgcgataaggggcgctcccccagtccgcaaactcaagccctcaggtagtgtttatgggataaccaagaagcagagccaaccgctggaatcccggcttggggctggaacggcccgctgagactttgccttctagctattgatatatttcttttcaaaagtccgtttgcgctcggcccgctctggttcaggtctggggctttgaaccggggcagggaatcctggcgcctgctgcgggtagagttgaaacttagaaaagtttacatccgaagggtgtttagaaggcggcaaggatttcgttgtaatgggagaaagtgggaaatggaattgttttttagtcatgaagtctggaggttaaacggccgtgctggcccaggctccttcaatatattcctgcctgcctcccccccagcaataaatagtttataagctcaaggaatactaggaaagcgtgactggtgaacgtactcctatcgcaaaagactcagtgcgcttttctcagctgttgaactggaagcgccttttgcagtgcgaggttcctgcttccccgaagccgaggctgagagttgacagcgtgcaccctgccgcggtctgaattctttttaaaaagcaagaccgatgctgcgtttttatggatacccttttcttttctttccccttccccgaaatgctatgtaatcttcaattactttttaaaatataacgtggaggtataaatcaccccggtaagaggtaccttttaattacgaggtgcagtggaagagctgaacattggaatctagctgttagcgagggcggaggggcaggaggatgatttacaaacatcatgtaagaatttgagcactgaattatgtttgagttagggagatcccttacaaaggaaattataaccagtggacaattgtatttcaaaccgaatctattaatttcatgagccgtttcttgattgagtgaaatgtctgtgaccataatagatacagaactagtaagcaccttaccagactatgacccatttgttagcaactaacatacacatgtaaccatcctgcttacaaaaaaaaaaagaggtacacaaagaaagagtgggaggagagaacctctttttcaaaataatctttgtgaaagaatctttcacaattttactcgataaataaatgttcattttttccacttgtctttcttcatcaccttaagccccttcatcctttacatatctttgcatttagacactctcacacttgggtaagttcttctataatttatataacaaataacaaatgatagtggtttgaatcttgcttttgactaagcattaaattgtgtttgtattaaaaaaaatctccttgccttcgtagcaaactcttaacttttgccattgtgaaaagaccaatgtggttagatgcaaaagagcctgaacttttttttactttaaagcagtttatatgtccccattctcttgtaacttcagcttcacaatatcattcactattttatctgaaaggaattggcatttttcttttctgtcttaaaatagctcacctggtgttgtgaccatgtgtatgagaatactctataaacacacaaatcacttccccaatatcagaaaaactaaaggaaatataaaataaaataaaaagatgtgtatctcaatactttaggatttttttaaaagttttcatcgcgtaagttttagaatcttcttttcatgtcttttgttttgcattaaacacatcataaagaggtatgatttgttgacttgttataggattaccatttggcaaaaacgcccaagacacgctgtttcaaatatgtggtattacttctgctttaaattgcgtgtaagagattgcaaaccttgttccagatggataaattgataaaatgctagctgctgttgggagaatggaaaagccctcagcaaaaaggctctgtggtgtagctaagtacattttgaattagggtgagcaagctatggagaccccagccgtttgtgaaaaaatatacacagtccaagcacgtccactttaagacgttgttggatcctccgtgacaagatgactcctttcccacaaagaagaaaccgtttccttattttttcagttacttttccaaagacaacttgcatcgggygcaagagagcagagttatgcagaaatccaaccgtaaccagctcagagcgaggactcattctctctccttccaccagatgttttttaggtgtcctcagctggaatgcccagtttgaaactaattaggccagcagtaaactccttgtataataaaatcgcaggccgtaatggtgaataagtgaggttcccagccgcttatgacagatgcctttctgggcagagagagaagagagcctgtggctgtcaggagaaaatgaagggagtggaggtgccttctttagacacaygcctttcctaagtatccacgcacatgatcgcagagcggaggagtggaagttgcgactggggtagagttttgtctttgctgggcaggcctccttcatacaaagatgcttgggggagaatcaattataagtattaggcagtgtcttcaggtcttaggtgtatgctgtgtgtgtgtgtgcaaaggcttggggagaaggattggtgtcacgtgcggggcagtgtraaaaacttaactgcttcccacctgggcacaaratgaaaagaaagactgcctggcctgacataaattccttgggagagaggagaacctgctcccccagagacttttgataaagggagaattcgcctaatgatgtggttccccttatctgtgaggtttgtgagggtgaaggagttggttagtctgttacctccaaaggstggactttctgactaagactgggttttgttggtggaaggaaccgggttttttgggtttttgtgttggtttttttttttttttggttgtttttgtttttgttttttttagctaactgttctgaaaaaggagttggtagactgtgctcaaaaggaatctctttacaaagaattaatcccagagttaagaaaacacagcctgttgacagaaaacacacacacacacacacacacacacacaccacaattcttcactcactcccaaccytcttccctgatctccatcccccaatgtcataacagcttcctgaatggcccacttctccccactatcatttgtggcagttcaaacagtcctaaacatacaaaacaaaaagaagattctggtaagaaaacaattagcagagaattcgctggagacaatgcttcgttttcactgtttgaagatcgtaactggcctaatggtgtttgactaacacccttttctagtcggaggaggataaacaccccctccgtcaggtggtaaatacttgaagtgacagtaactgaggctgcagacccacttgtgttattgtaaatgaatcagaggggcaagaccttgttctttacggcgtgtgatttaaaatcagttttaaggtacctgccaggtgtatttagaggaaaaggcatgaaggaagccacaggcttatacattcatttttagtgcatatttctttttgttcattttcatcctattgagttcctttgtcatttctctgacttgcaaattatacccttctgtttaatagtaatgatgaaaatagctgctgtttattgagaactggtataccaggcctgcagtcagctcttcacgtgtatttttaaagtggattcttgccgcaaccccttgagtattattatcattatttcaactttgttaacaaggaaactgagtcgcaggtcaaatgaccgacacagggccagactgagtgaaaatgaaatctacgcttttgcttctctgcaaagtatgccttatccatgtgcaatacaagctttggctcaaaacatttctgctatcatttcctttggaggaagatgctgaatttgsatggttttaaatgcacagaacacagttattttctgaacctgccctgacgttttttgccactgtcgtttgaaatggggaaacaaaatcatattaaatattcaggaacacaaatacaaacctctgtgagccatgacccttaaccggttgggtatggttctgtaaaggaaaatgacggtttatttaagggctaatttgatttattccttcgatactaacactacgcatttcaggtcctaaaaagagtcaataaatttaccggcagtggagaggccctaaaacattacggtaggcgcagcccaagtcaagtttaccggaaggtgctggatcgctatgggtgggtgttgtttcgggttagattttaaacatttggagagcaaagaataatttggaacaggtggtgcygagagtcaggtagctggaatgatttatctttgcctctttgaacgttaagggaggccactggttgcctgaatctggaaccagcaggctgcgggtcagtgggggctgagagactcgtctttgggacaaactttggcaggatccaggggcttcgtcagcgctgtcatcgcctttggatgatagtagtcagaacacagttgtgcctgctcgtgcatttttgaaaagtctgcctctgccttcagatatatgcagaaatctaaaacaggaacttagacgcgccgcaatgccaatttaaacatctttaaaaatgaacaaagtatgtaatagaggttagaaactcttttgtcatttggtatcaatagtgttgtgtcagtaacatgaaaatgtgtgtaatttcaatggcattgcactttcttcttcttttttccttttgagtatctagtaaagttacattttttaaaagtctgtgttcccagatgtaatagatacgaacgtatctacttgcagtcattcagaggagaattgtcaactctctgctaatgtaactaaaggaaaaatgataaaatcaacatatttttccccaaagaatgaggaactggagggtttgactactgtatatggcaacttacttttgtctcgcgtcagctaaatctgtcagttcccctttcttttctattcatctcccaagaatggcctttcataactgaaatacacgtgtattagccaaaagacattttaattttgtaaagaaaaatcatgccagagacagccgggtctgtttcaaccattattgtttctgcagcatgcatactttgggtttcatggtaagatgtgggtttgtcaagaaagaaaattacagcaagaagctatgctgaaaacatatacacttctgtttaagaaatgagaaaaacacagaaaaattccacacagtaattgcttttacgtgagttttaaatgtcattgtttgacttatgtcaaaaagcccccttagccagttctctcatactccgttaccaaatatctcaccttaaaaacagcaaatgttggacttcattttgatgatctttgaggctttcagagatatccttagtcctagtggaaacattccaaatttttagattgtgcaggccatttttttaaggttacttagatatcgattttattttcttgacccaaaatgagaaaacacggggaattctcaaaagctttttacaggctgctattacgagaagagaagccaaaccaacatgtattaggtcatgcrcttgaagtgcataaataagccctatgaaggtcaccaaacagggtgaaaaccactagttctcgttaccttggccacctctaaattcctgcctgttagacgtgtttggttgaagtggacacagaaagcgggtttccgagcccgtggttgaaagatctcaatttgacttgggtcctcaaggcgtccttgtggtaaagggagataggaaggctgaaattctggtctcctccccatggctccctctcacggttccggagaaaaagcaggtactggggccttctcttactccaaagcagatgtttcctacctggtattcggatatgcggaagtcagaagctgaaaataaaatgaaatgaaaatgttccttctggtcagtttcttcacctcccattcccttcctatagtcactttgtggttaaggtattcatggtttccaaaacaattttttgttcccactatgttttctagcatttaagatgcaaggtataagtactcacctttaaatctctattgattggcagcttcctgaaatacagagtcagagagcgtgtccaccacgtcctgagtttggtaccaacccaggtgctgatggaaattccaagtagggagaaaacgtcctcttcggagaggcagggtgtcagcgcaaagaggttattttcttttgtgggtgtgtattatttgcacatatcaggacttttgtttcagggtgttctagaaacattgatctctccagcaaagttctgcgtgtccttcttggttgggaagggagcggagaggaaggagccccgaggagaatcgtgyacctttggccttttgtgtgactcctagagtagagggaagcctccgctgctcggaaggtgtcacgtggtataacaagttgtgacttgtgcctgtgttgtcaacagagttttagccccgtccagacatgaaaaagaatggagccccgaagatgattcacctcyggtctgcgatgggcccaagctgtccagtgctctcctcttgctaaacagaccatactccctggaggagttaatggctrgggtgtggagagaagaccggtaggaggggagaaagaatgccttaaactcagcaaatgtctaaaacgctcaaaatgtctcagcattgctcaggcacccacaagaaagacaaactgataaaaggacatagaatcaggctttttttgagggggaagcacagagaggttgggggtttgctagaggtttgatctagagtggacaatttttctaacaccttgggacccgattttggaaatgtcttcctgtagccttgctgtcattcctttgtgcttatttttagtgaattagttttggggattttcttttgtttttaagaaaacacagagttgtaagacttgtttgggaatcacaggttttattgaacacttattatttattgaatatttattatgtcccaggcattgtgctgtggaaatactttatatgttttgtctccaaatggcagtagatggaacgtgctgttattattatttctattttacagatgtggaaactgagtctggagagtaacttgtccaggatcacatggcttatgccagagccaggattaaacccagttttgattcctaaccactaggatgtccagcctgctcccgtggtataacaagaacttccctttctccatctgtctgccctggagagctagattttaaagtccttttccacttgcattgccttatggatatttatcgatggttaggtacaaaaatcaggttgagaaagtaagagacgccagcagattctcacaagattttgaatctgcccttgtagaaatgaatgaatgtttcaagctggacctatggaaatggtcgtagcatcactgcagttagtggcctaagtcattgcttacagctgctcttgccctataaccgcagggttgaacagccgtactacaaagaccatacggcctgcaaagactatctggccctttacagaaaaagtttgctgacctctaagctattgcaatatgacaagacaatccttgtagaccagaaataacatgcacttgggacatttcgtataccatttcaatgatttattatttatcaggtgcctccaatgtgcttgacacattgcacagtgataggggaaaattacaagtgacttcattccttcatccatttacttaacaacacttatttagctgtgttctgggctgtttactggagagccagaggtgagaaggaccaaatccagcatctccggtaggaggatcccaatgtgttctcaccagtatcccatggcctcttctttcctgagggtgcagagggtgttgacatgactttttgagctttctaatgtttgagcagcagaatggaagcaacacctcagtctgtagaccctcacccacagaagctatgcctggttcagtaagagcagtgcctcggcttctgcacctgaaaccgcactaggcatataggacttaccagtgccccaggcttactcggccgacagcarctctctgcttccctcaatgcgttgtgcagaatgaggaggaatgtagagaatcagacttyccaaacctcagcctgggtactgactttcagcctcgagattaagagcttgagtccaggagccaggctgctcaggttacacttcccctcagtgttaacctactcctgcgtttaacttgggggtaagttaccagacttttcggtgcctcagtttcttcgtctgtaaagcagggtgaataataatgcaccttcctcagaaagctatcgtggagattgagttaataaacatgaagtgtttggaactacggctggcaagtggtatgaattatatcagtgtcagctacagttattattattatttatgaatttgacctraagcaaattacttagactctttgggatgataataataatagtaacaacaataataaaataacttttcatagtgccattgtgagaatataaatgaggcgatacatggaaaacacttagctttgctacactgcctgcctccattcaatgttcaatgagctagctattgagattatggggaacagtgcactggatcagtgcggtgtctataagctattgatcagttgagtcattttaggtatcgagagaatgttgggcagtggtcgatagcacaggccctggactcagacagatctrgcctgagcctgagtcagtccatcactcacggactgccatctccagcaggggtctgaccctctcaacgtcccagacatcggagacagcagttaactgttcctggggtggttgggaggcttaaaagagtggctggcacaccgagcacagagcagggtgtttggcacatagtaagcactcaataaatggtagcttgtattattaccacccccatttcttgctgtacccccacccccaagaaagcactgaacattagtaaattttaatttgaaaataaaagaacacattttaaaactgccaaacagatttaaaataatattcattacacaaaattaaaatattctattaaagccagactttgggctcagaccaaatttttataacccaagcttaaaggccagggagtcccccagccacaatggggacattgtgattgaacttgagacttcaacgctgctattgagcagtctttgaaatgcatgtttcccctaaaataaaagggaagtaatgggaaggaaaaaaatgaggttcttgctcccctcaacaagccttaatgaattggaaamgaaaaacaaaatatttctcatttttctcctgctactcgatcctgccaaagacgcackgcccctcccaaccctggctttgaatggtgcccactcagaaccttccagatctgatatgctatatgagcaaacctaatctaagttgtaacattgtagtcttcaccaggttttacagatggcggattgtatcactgsgaatccagaatggggagcccaaattcctaggttcaagtcctagttctgcctcagtttccctattcacaaaatagagacagtcctcctactgcataaagtggtggtgggagtctgaacggttagctctccccatggatgttttaatcttctgctgttacctaatgaatgaaacttgccctgagttctgggactttgaaaaattaaagtatacaggtatgcctctgagagttataaattaaaaaaaagtctattcagggaggagaatggaggagggaagaaggagacataaaaatggctcacaggagttattatgtgacagacactttcacaaagctcatttaatcctctcaaaaaaaaaaaatacatgatatacatgtgtccatttaacaaacatggaaactgagacttggacagatcgagtgactgcccagcggcattccattccaggtctgtgtgacccaaagcatgggcctgttgtaccacatgacccacagccctcctggaacaaggtcacaaacaatcatggtggactggagagactcccctgaccaaccagttatttatgatctattcttacatttcaatagcatccttcatcctcaatgagcctgagttgctgtggccttttaccccacattccattgagaaccagtagattttttcttgaacagcacatggaaaaagtaacgtaagtgggttgcaaaatccttttctggatgaaatccttcaagaatccctgccatttcttgccaaccggaatgaagtgacttcctcctcagaccaggccaggcccttggctatggtgtgggaccatgagacagagttgtctgaggctgggcagctcctggagagggtatggggtcccctctatcaccaacctgctgtgtgtcttcgggcagatcacaagagccctctgagccccaatctcctcatcagcccatggagcagacaccttctatataggatttgttatacgacttaaataaaatgacagtggaatacttagggtactgtggaattggacccattcccaggagtactcaaagaaaggggagaaaatgaaagttacttgccccaggcacattccttactgttcttcaggtagctaccgtttggggactttagacattctggaagaatctgttagtctctgaagggcagacttctttttaatgatgygggcaccctttccacattaacttgaaatgtacatggacattttttttctttagagttctgtctctatcttattatgcatttggaaaagatataaaaagcatttgaaacaaatggttttacaattttttactgcttaagacaaaaatgrtttaaaaaccaagtccatcaagtaattgatagcaaaagtggcacacagccatggcagagttcatgagggaagtttcagaaacacgaatctgatgatgtgaagctttccytgtgatctattcatttaaaataaaacattttagttttaaaactcatccccgcaggctgcgtacgacaaattccacccaaatacccagaaccttttactaaccagaattgcaatgctgtgctgctttcaggggaataaaatgaaacaaatgcagtctctcggggacattggtaaagtcatctcagagtacatcagtgtccgggcacatctagtctgtgtcttgtatctttgaaagaagaataactaacctttggatgactgtaatgttgataaaaaataatctctgagggctaactttatgccgggatatgttccgaaagattataggcattaactcatttattccttgcaataattctacgatgaaagtactgttactattcccagtttaagtgagaaaagtaagacacagagaggtcaagtgacttgttcaaggtcacccagcaagtgcaggggtagagccaggctttgtatgtgggagtatggttctagagtttgtcttcataacccctgacttccctgattctttaaccaccataaaaaattaaactctttgaccctcacttacttgcacaatgaattaattaaggacaggcatgagaaggggctgaaagcgatgttaaatctcagttataatttttcagtttcttacaaggatgtatttgcgtattccattatctttagggtacagtacactacagaagccagtctctccacgttcaaatccactgtctaccacttactagccttgggcttccttcacctctctcagcctcagtttccccattgatgacrtgaaaataacggactctgcataacaaatgcattgaagaccacgagacacacacagtgattgttaaaagctattgattacctgtggaagaaaaattaagtctagaaatcatatcttcctacagggcacaaatgcagtttggtatagtttggagtgaaaaagaagggaaaaccgcctgagctgtgaggttcaagctggaaaatagctcaggtttttccagatgccttaagactgagccaaagagaccrgctttccatgtctccacatgagaagttaccgagctaagtcctcaacaggcagcctacaagccattgatgttagaatctgtccaggtgaggaagcagcagcctgygggagggtcttgcccatggccacatggccagtctgtggcagagtggggactccccaccctctttcaagacgagtgagggatcttgggtagcatgggtcagaggtggagaggaacacataaaaacaagcgtgaggccaggcgcagtggctcacacccgtaaccccagcgctttgggaagccaaggcaggcggattgcgtgaagtcagaagttcgagaccagcctggccaacatggtgaaatcccatgtctactaaaaataaaacaattagccaggtatggtggcccgcatctgtagtcccagctactggagaggctgaggcaggagagttgcttgagcccaggaggtggaggttgcagtgagccgagatggtgccactgccagcctgggtgacagagggagactccatctgaaaacaaacaaacaaacaaacaaacaammgtgtgcctggagcgactgtctatgcaaactctgacatcagctctaggctctagtttcatgattttcattttatttcttgttcccttctttacattggggaaaatgtgtttttctctagaagcaactacctggttttcagtggcaaggtgcacagactttctgggttttccattcaccattctcctccactgtgcctcccgcttccatttcctcttcagtatggaaatggcacttatttattcattcattcaaaaatatgtattgagcacctgctgtgtgccaggccctactctggacgtggggaatgcagtcaagaacaaaaatgaccaaagtctccttccttgtggagccacagttaagtaggagagagaaaataaacayatatgtatataaggtacgcagaatatcaaatgataagtccatggagaaaaaaggtcaagagaagctgacgagaacatgcccaggggaggcgagaggaatgcagcgctgaaggaatgtaggagaacattctagaaagaagcggtagcaaggacaaaagtcctgaattgggagcagccagtgaacaaggagggcagggaagatgaggccagttctggtagggccttgctcagaatccagctgccgttctgcgtcaatcagtcatgtccagagtcaaaattatcgtaatttaaaaatgatttttcaaagtacatagagcctaaatctgaaatcaatgactgcaaccgcagatacccagagaacccaaacaggtaagaattagtggagtaggtatgctaatagcagggactccacccggtgccattcaggaatggtctccgtgttgctaggtgttctgatttttcaaaatctgaatttttaagagaaatgtcccgcttttaaaatcwctatgaggaaccaccagaaatatacctccaggctcatagkgtacgatccctctcccaaacatcgacacagaccctgggaatcaaatttcagtgaaaaggcactaagcctctctcccgcactttttttttttttttttttttttttttttttttaccaattcctgaccagaaaggatgccaagagatgctaaaaattgtttccaggaaaaagtaggacttgaatctcatggggatgaggctgagacttcttccaaggagcaatcagcttgcttcattattatgtctttctcaggagtttttcctgatctccgctcatcatggggaaaggcaagatggtccaaatctatcctccttcgggttttcattagtttcttgatgatgattattatgtcatctggggttgatttaagagtggtgaaatgtttgcaggtctcataaatggttgtcagccactgtttagaatggcaaagaactttttatgttgttcccattgcaaggagtggggtgatagtttccaatggctacagacaaaagggggaaagtgggttctgaagccttttacaagaggagattggaaagttgagtaattcaatgggggtgcaggtgggaggcagtaaggaamgctccaggagctttttaagacctgagatgcctacattgacaatactgaaatcatcgtcggcctccccagccccaaagctgggcttaagcaaaatcccagccagtggtcgccttagctgtggagattgctccagatgtaagtgacaaaaaaacttacttctgagttggtttaagaaaaaagaaaatgtattgccttgggaaatgaaaagttcgaggagggctggtttcaggtacagctggttcaagagctcagatgcaggtcatgtgcccatctcttaatcagtctctctgttcaagaggattctgtactgtgccacctgtggagctgtggatggagtgagagaaaggtagatttccaaagtgaaatcggcagcattttctggaagtgtgggtggactggttccttatatcccccaaaaytgtacctataggtatgccttctccacccctctcctcctggactacagtgctgcttatgaaatttgtgctttttccaggcacgatgttatactctttgtgtgcatgttttacttttctcctcaaacattcttactaggtcagtatttttaagacctgctactattctgccctccacatgctcttccccatgggcctggaagattatcttttatttcaagtaagggtgtttgtcttacttatttcaagtaaggatgttcatcttaagggtgggtcatctgtatttgtctgttcttgcactgctataaagaaatacctgagactgggtaatttgcaaagaaaagagttttaattggctcacagttccacaggctgtacaggaagcatgttactggcatctgctcagcttctggggaggccttaggaaacttacaatcatggtgggagacgaagaggaagcaggcacgacttacatggtggagcaagaggaagagagaaagaggcgggaggtgccacactgttgtaaacaaccaggtcttatgagaactctgtcacaagaacagcaccaaaggggaaaatccaatcccccttgatccaatcacctcctaccagaccccacctacaacactggagattccatttcaacatgagacttgggtgtggacacgcatccaaaccatcttatcatctcttttcatggtctctggtacaaaagttgaggcactccagccaagcataggacatgcgctgggcttcagaggataagtgagagatgaatcaggatcactaggagtagaagggttaccctggcaatgcacgmattcccaggcccctgatggtcagcctggatttctttttctgctctgagcttttgctcccgttgctgcctgtattgamctttctcatgctccatctaggggcatggcagtaacatcgggtacacacagaggttgcacactggcaatcaagatgtgttttgtttggtctgcagatcatttaaaaaatagaatggagccaactttgaagatctggatctttcacacaaaaatgtagattgctggctcccatcaaaacatcacaagatctgtcaacactgtgcccacatttccacattaccgcagttgactggggctgggaactgtctgtcccttttaggtggataagttagttcacccaagtcctcacctttccctatagtctctccaacaccgaggttcaggttagttaccatttaccgttgggaccatgctgttggctctcctagagtagatttaagacagaaaagaaatctttcctatatctagatctccattagaagtatgaaaatgaagtgtaaaccaaggtggtccttggtatttacaaaaargagaaagcatctgtcttcaggtaacacagggtttctcaactttggcactattaagatttggagctggataatttgtgtgtgtgtgtgtgtgtgtgtgtgtgtgtccactctgtatactctaggatggcatttaatatgtccatgtggacatcatgcaccatctagaagtaaataggtccctgtgctccaggcgctcaccaccaggttggtacaaagagttaccataagtgaggaaagctgttcttctgcatggcacccgggcaggctcagcattggcagtagaggttatgagttggctgatttttgatttagtcctaagtggacttgccaaccattgaggctgtttatgactgcctgtttgagatgttatagaaggaattcagtgttgaatgagaggttaaactattttaaagagtctttggagaatttcttaactcttagctgagtgaggccatggtggatgctacttgcaaaaagtttgaaagtagcatggatggaactggaggacattatgttaagtgaaataagccagatgcagaaacacaaatatctcatgttcccacttgtgtgtgggaactggaaaactcgatctcgtggaggtaaagagtagaatgagggttcccagtggctggaaaggtgggggtgatgaagagaagctggctaatgggtagaaacatacagctacatagaaagaaaagttctagtgttcaaaagcacagtagggtgactgtagtcaacaatatgttctatatcaaaatagctggaagaaaagattgaaatgttcccaacacaaagcaatgttaaatgtttgaggtgacggatattctaaataccctgatttgatcatcacacattgtatgcatgtatcagaatatcacatggaccccccataaatacatacaattgttatgtatcaawaaataatcttgcaaatagaaggtggagcatgggcagtggttgggcttgttggagagtgagcagaaggaccaaatgacctctggatgtctcttatgtctcctccagctctggttctgtgagctgaggcttagtgagtttcaaaatgttgcctactacatgttcgcaactgctaaccgtggtctaccatggaaactcaaaggcatggatattcagggaggaatctcatttttccctaggctagtactgtgtacgaggtgagacttttttttctttttggccttcccctagtgttacaaatcctgtcgagtgtctgaaataccatccatgtgaaggtttcccatgataactgtaacagctgccattcatccattcaacacatatttattgaacacttctatgaggcagccactgttccaggcacttggcaagcagctatgtacaaaactgacaagtccttgccctcatggagcttttgtttaggggggaaagaagatagacaataaaaaagcaaatagtaagacagtcttggcattgctatggggaaaaagtaagtagaggggagggaggttgatgggaaacattgaggtagaacagggaagaggaatttttaatttttttttttttttttctttttttttgagacggagtctcgctctgtcgcccaggccggactgcggactgcagtggcgcaatctcggctcactgcaagctccgcttcccgggttcacgccattctcctgcctcagcctcccgagtagctgggactacaggcgcccgccaccgcgcccggctaattttttgtatttttagtagagacggggtttcaccttgttagccaggatggtctcgatctcctgacctcatgatccacccgcctcggcctcccaaagtgctgggattacaggcgtgagccaccgcgcccggccttaattttaattttaaatagggtggccactgtgatggcatgctggtaaactggttctctggaaattaaaggtcctgatttgtagcctctgccacttacagtggtgtaaatactcccaccatggtcacttacagcccaacagtgattttaacaaggagttcacaacattcatgcacatttaacaattgtttcttgcaggctggtacaggctggctgcagcacatcactggcaggcaaggcctccctgaaactatctggcagaagagcccacacagaagctctgagtggggttgtgcctggtgtgttcaggaatgaccaggagttcattgtggctggagctgagtgagaggagaggggcaggagatgtagttagggaagtagccaggggcagataatgtagggtgtttgaggccagggtcagatttttgacttctaagctgagtgaggtgggagtccctggaggaatgggatctgagcagaggaaggacatgatctgccttaagtagagcagaactcctctggctgccaagagaacagactgcaggggtcagagggtggggcaggaaaaccgttaagagactgttcagacagggaggtgacggtgacttggaccagggtggtggcagtaggatcagggagaagagttggattctagatatgcttttaagatagagccgatagaatttgctgagggattggctctgggaagggatatgaagagaggagtccaaggtgactccaaggcctctgggctgggcatttgggaggatggagctgccctttgctgaaatggggacagtggagggaggagcaggttgggaaaggagatgggagcacctcgtgtggacctggcattgagccaggtgtttgaatrtatgatcatctccttctgtccattttatcacgcccattttggaaaggatgtgacagagagttgaggttaatcagcatgcccaaggtggccctgctggtacatggccaggccaggcctcccacccctttaccactctgctgtcctactgtgttttcttggctttctcagtcccgttcctcctcttcgttttgaggaaatgacaacaggagaactctgcagaagaaaccacctaggagccgagacctctccctcgttcctaaagagctgtccagcggttaacgctggacacacatcaggtctgctcagtggatctgtcacccacatttttccctgacaaatttgttggattaacctcatgaagatgaatrttccacagtagaactcacacttaaaaaaataggagtcagtggcataaaggctttgatttttctgtggacacaggcttaaatccagattctaccgcttgatggcttctccatgggagcctcagttttctcatctgtggagtgggtgtgtattactccattctcacactgccaataaagacatacccaactgggtaatttataaaggaaagaggtttcattggctcacaggtcagcatgtctggggaggcctcagaaaacttacaatcatggcggaaggggaagcaaacacatccttcttcatatggtggccggaaggaggagaatcagtgcccaggaaagggggaagcctcttataaaaccatcaaatcttgtgagaactaactcactattgtgagactaggatgggagaaaccacccccgtgattcaattatctccacctagtccctcccacgacacgtggggattatgggaactataattcaagatgagatttgggtggggacgcagccaaaccgtatcagggagtaagaagagttcctctctcagattcaaggagataatgggctgaggcacttagcactgtgccagccccatcgtcacactcagcacacagagggaatcatgaccatgattgtttgagagagggaattagaaagttgggttcagttttaggcaaaagctgacctgccttcaaagctggagtatggggacagggggccgtgcgtgggacatcgtrctkgagagctttgcagtttggccttttcttttctctaccggagatgggaggcctctgtcygtgtttctgctgtgttcaccaggaggccagtctggggcaattactgctccccatctcccaaaggagccacatcagcctcatagcagtgtctctagcttcgagctgttgcctgtggcaggcagaacagtgtgtactcgcaacaagcaaatccccagatgtgagcccattcggggctgccacgttttttcctgatgaaattcctgacttggtgtgttgtgtttttttaaaaaacacgcccactgcctccaaaaacctcagccggggaagagaaacatttctcgttgaattcccagtttttgaaacggtgtcaaattatgcccctctcatggcctggatacgccattctttccacttagtgcttttcagagaggcctgggtggcagaacgtggatgttatctaggccagcctttgcattatacaggtggggaaactgaggctcagacaggccaaggaggagccccacatgggaagytggtctcagagccttggtgatacccccagatctcttgattccaggcccactttcttccttcttcatcagaggtcacaaatgggcaggctgcagccacctctaccctacagatgtgctttctttggcctgagattgttttgatttgaatgagttgccggcatttaaaaattaggagattccatataaaaacccagatttctggcttctctggggccattgggagatctgccaaatgagctgtgcattcctgcatggtgacaattgagggtctcagtcatggccactccctttagccagagcatgtcttcatcagttcaccacagtccccgcccctccctctagtacccccggaccygggggctcaatgtcacttgtcatcatggcgctttccctcccagttctataggggtgcagttaagagaaaagtgaagtatttcttgaaactgtgtctctatcaaaaagaaggaaacaaaagatcaaccgaaatgaccacttgtttaaacattaatagtacagagcatgattgctttgtggcagagcaaaaaatttctatgaatttcatatgcaaagagaatacgtcagtgttgaaaatcgctggccccttcactctctgaggttaccttccccttctctgccagtgttacacttgccatccctgcgtgccaaggccatagtttccacttatttttttaaggcagcattaaacttatttgacctacatctgcccccctcctgtgaaacttgaaatgctattaaaccaaattaagaagtttttaaaagttgaaatggtctttaactgctcgagaaagggtgtatgtgaatatgtgaatgtattgtgcagtgtgtgtgggtgtgcatggacaagtatgctgtgtgtgagtatatgaatgtgggtgagtgtgtcagagtctgtgtgaatatgtgtaggtgcttaagtgtgtgagtttgtgtgtgtgtgtatctgagtatgaaggtattatgtgtgtgtgcatgtgtgatgggttcttgatttatagactttgcaccaagtagaattggacaaaagtgtttttctttggctctgggactggcacttctgggctttaccatacatttaagccaaggtgcaaagccaagttggttttaactctaatgccacgtcagtgagctgggttgagattgaggttaaggttgactttcctttcttctgggatatagtggggggcttttggaggggagagctcggggtgctaggctttacaaatgatgctcactttcttcccagagcagatggccagaagagagggggctcacactttgaggcctgctgtgtgccagacattcatatgaagattatctctctactgttcgaagtgagctttggacccttccttatttactgatgtgttcattttggttctgttaggaaaaatatatagagagataacctataaaatacataaattagtagtatttcttagaacaaggctcagtttatttaaggaggaaaaagagttcatttaaagaaaaaatatgttaaatgatatagtttgtggaggtgagaaaatcacaaataattgatccttaccatgtgcaggagtggtcaggtgggcagcctccccccgagtcaaaatcttcctaacatcttgtacttcctcaaagcacttaaacttgttaaatacttaatcgtatatgcttttgcataattttgtctcttttcaactaggactgtttatgtcatttcaaggttgcctttccagcatctagcagagtgccaggcacgcaggaagtgctcaggaaatagcagcgaatgcatgcacagactccctgccaagaggggaattactgtccccattttatagatgaggaaactgagggtcagagtgacttgcttaagatttggcaactaggatatggcaaaacgaagatttgaacgcatgactctcaggctgcacaaacctttttgccaaacaccaatacgtgggactcaggtcagacagactatgaccactggcccattgcaaaatgaggaaagcgaagtggatgtgaagagtttcataaagctacaggcattccttggagatgctgcggggttggttccagaacgccacaataaagccaatatcgcagtaaagcaagtcacgtgaattttttggtttcccagtatgtatgaaagttatgtttacactattactgtacgtaggccactaagtgtgcaatattattatgtctaaaagaatgtatgtaccttaacttaaaaatacttcattgctaaaaaacgctaatgatcgtctgagcctttagcgagttgtagtctttttgctggtggagggtcttgccccattgttgaaggctgctcactgatcagggcggtggttgctgaaggctggggtggctgtggcaatctcttaaaataagacaaacatgaagtttgctgcattgatgaatccattctcttccttttatgaaacatttctctgtagcatgcaatgctgttttatagcattttacccaaagcagaacatctttcaaaattagagtcagttctcggctgggcgtggtggctcacgcccacaatcccagcactttgggaagccgaggtgggcggatcctgaggtcaggagatcgagaccatcctggctaacacgctgaatccccatctctactaaaaaatacaaaaaattagccgggcgtggtggcaggtgcctgtagtcccagctactcaggaggctgaggcaggagaatggcgtgaacccaggaggcggagcttgcagtgagccgagatcgcgccagtgcactccagcctgggcgacagagcaagactccgtctcaaaaaacaaaacaaatctcactctgtagcccaagctgatgtgcaatggcacgatctcggctcactgcaacctctacctctggggctcaagcaattctcatgcctcagcctcccgagtaactgggactacaggcacatgtcaccacgcccggctattttttttagtttagtagagacgggtttcaccaggttacccagagtggtctcgaactcccgcactcaggcgatccatccaccttggcctcccaaagtgctgggatacagacgtgagccaccagcacctggcctatttccaccacatccgcagtgacttcctccactgaaatcttgaacctctcaaagtcattgatgagggccagaatcaacttcttccaaactcctgctaatattgatatttttacctcctcctgtgaatcacgaatgtccctaatggcatcttagaatggtgaatcttttctagaaggttttcaatttactttgcccaaatctatcagaggaatcatgacctatgacagctatggccttatgaaatgcatttcttaaataataaaatttgaaagtcaaaattactccttgatccatgggctgcagaatggatgctgtgttagtgggcgtgaagacaacatttatctccttgtatatctccatgagagctcttgggtgaccacgtggactgttgtgagcagtattattttaaaagaaacctttttatctgagcagcaggtctcaacagtgagcctaaaatgttcagcaaaccatgctgtaagcagacatgctgtcatccaggctttatgttattctattcatagagcacaggcagagtagatttaacatcattcttaagggtcctaggattttcagaatggtaaatgagcattggcttcaacttaaagttatcagctgcattggcccttaacaagagattcagcctgtcgtttgaggctgtgaagtcaaccattgacttctcctctctagctatgaaagccctagatgggatcttcttccaatcgaatgctgttttgtctgcattaagaatatattgcttagtgtagccaccttcatcactgatcccagctagatcttctggataacttgctgcagtttgtccatcagcacttgctgcttcgccttgcacttttatgttataaagatggctgctttccttaaacctcctgaactcttggtagcttcaaacttttcttctgcagcttcctcatttctctcagctttcatagaattgaagagagttagggccttgccctggattagcctttggtgtatgggaatgttgtggttggtttgatcttctatccagaccactcagactttctctgtatcagcaataagactgttttgctttcttatcactcgtgtgttcacgggagtagcacttttaatttccttcaaaaatttttcctttgcattcacaacttggctaaacatttgttgcaagaggcctagctttcatcctgtctcagctttcgacatgccttcctcactaagcttaatcgtttctagcttttgatttaaagtgaaagccatgcgactcttcctttcacttgagcactcagaggccattgttggattgtggattggcccagtttcagtactcttgtgtttcacggaatggggaggcctgagcagagggagagaggtaggggaacagttggttgaggtcagaacacatggaacatttatacattaagttcaccatcttatatgggcacagtttgtggtgcccaaatcaattatgaataatatcaaagatcactgatcacagatctccataacagatataatagcaatgaaaaaactttgaaatattgagagaattaccaaactgtgacacagagacatgaaaatgacactgataaacttgctcaatgtaggattgccacaaaactttaatttgtttaaaaaaaaaaacagtatctgcaaagtacaataaagcaaagcaataaaacgaggtcttcctgtatttgctttattgcggtgatctggaaccaagcccacgatatctccaaggtgtgcccgtatactgttccaatttaaaaaatggtctgttatttttattttcttcctattttgaggacgtgacacgttatctttttatgactaaaatttctcattttttgtttttaaatgtttcactggacaaatcaaaatggcagcctccttttgtgggttctcccagtttttttctttgtattgctttttttcgggagggagattttctagttggtggaatcccagagtctgagaatcatcagacaacttcaagctcctctggagatcttatcaggtccattggggaaatctctgagctcccctctgacttctttccaagtcacttcaccatttccccttcatggggtggggccagtgtgtctccctcattccaggccccagggacacaaatgcaaaaaccagagccacatctcaaggatgtgtcctgggacctctccagagggccagagcctgcccttactgattttccagggagctcaggactcatcatctctctgggagaaaytggtgccacccaggatggccttggttagtacggcatctcttcatgggctctgctcacctcttttggtttcagcacaatgcagctttcctttccattttcttaaccaattcagatgcccctcatctaactgctaatcatagctccctgttgagcgaggtgtcacctctgaaagtctgcccattgttgaccctgcggtctcttcttccaggcttggaggctgggtagatgccatttctctaaccctgccagaactctagctgtgcccacacctccgctggctcttagtaggggcgccttctcagtggggaggctgacacagggctgtggagacttggagccagcaatgcgccggccctcgcctcagagagcttggagcctcrtaggtgagaccaggcaagcacagatgtttccttgggactggattctaggccctgttgagggctggagggtaacctcttaggcttgcatagtatattacagtttacaaacagtctccacatttattttcctcatgtccatttgtagtcctctgcagtacgtgatgcttatcttgcccagctggcatccattcatctcctggttttcttttctttcttctcctttctcgtttctactgcaccttcaggccattaccccactctccagttctaagtgcagacctgtgacctccccatgggcagtcacaacatgctatgcctctgccctcagggttcaggcacaggaactggacccaggttgaatggggcccaattctgggaactttgctggaattgttgaggaatgatgccctcttttctctgggttgctaaactcatagaatgtagccatcttgcttaggggaagcctgcctgaaactaaaggcaactcaaaggaagacagagacaagatatggagggcaaaagattcccaatgacctcatttgagcacctggatccagctgttcctgaagctagataccatgtgttattcccttatattagccaatacattatttcttktttacttaaagaagtttgaatggagtcttctcccaattgctataaactaatacaggtggttttgcatttactaagttgccctgcttcctctgatcacagtaaaactccctttcatgtatgaaaccctcttgtaagtgttttcatagcaatcagactcatgtctactagacacagcactggcctaatttcagtgaagagggatttgaggcacagaagagaagggaagcaagttgaggctggaacctgcgtttyctaacacctgttctagtgcattttccacttggagcatcctcaccagctttcagtttggagaacagtttttaatacccaggacatcatcaccccggaggacaggagtgctaattgatttaatgaacaacccaagcaaggtcagagaaaactcttaactacatcacagagtaatcagaagagttacactaatggtaattttaggtgcctagaaaatctctggtagataagagaggaaatagttaactgtagttacccaggggaaaggaaatggggaaaaggagattcttagttttttactgtgtatactctactgtacattccaaaatgttttactaggggcaccgattgtttcatattcaagtaaacagtgaattttgaaatgtaacaacagcaggcttccatctgagacaattagagcatcaaatagtgaattataaaccattgaaaaaatacaaacctatgaatatataccactaataaataggtaaataagtaaatagggaggagggaggttttgtgcttacagtcgaatgccgaggaccagctagaattgtgggggagagctgggtaagaaacacaccatgttgcgaccactataataaagattggttcagtcaagaatcatcatcaatagatgctgaatttggggtggggatgttgataaggagtagcattttgcatggtcttaagtgatctcttcacgatggcttataaattttaagagaaaataatagtcactatgcagtgcagaaattggtgatctgtatcaatgtcatcactgagaggcagatagacaggatgtccggagaaggacgcagcatcacccatgcagtattctgggagggtgcatgacccgaatctaataagaaaagagcagacaaacctagaatgaggaacattccatttcaaaaaaaggtaccttcttcttcaaaaatgccgatgttgcaaagtacagaaaaagactgaagaaatgttctagatgaggccgggcayggtggctagtgcctgtaatccaagcactttgggaggctgaggcgggcggatcacttgaggccaggagtttgaaaccagcctgggcaacatggtgaaaccctgtctctactaaaaatacaaattagccaggcgtggtggcagacrcctgtaataccagctactcagaggctgagacatgagaattgcttgaacctgggaggcagaggttgcagtgagccaagatcgtgccactgcactccagcctgggtgacagagtgagactctgacttaaaaaacaaacaaaagaaatgttctagaccaaaggaatctgaagggataggacaactaaatacagtacccagttctagactggattctagatagmgggggagatgtgatacaggaaattattggtgaattgacaaattgtactgtggagaatggattggttaaaatattgtrtcagtgttaaagtgattgaagtgggtaataaaccggagattctataagagaatgttatttttcttgggaaataccattggaatatttacgagtaaaaggccattatgcatgtaactctgaaatgatgcacaaaagaaaaataatacacgtgtgctgggtgtgtgtgtgtgtgtggagagagagagagggaattggtaagcacatgggtgaaacattaacagcagatgcatctgggtaaaagatctgtgagtattctttgtactgccatcacataggtcagcctctctccaaaacctgcactcttgtttactaaaacagtatttctcaaaacatggaacgccttagtgattttttttaaatctcattttgctaactttcagctcttttaattaagcccaaaagagaatcttaagttggtgctggatggtttggtttttaacaccaaacacttgctaattctctttgtataacaaagagagtcatcaggcaagcagtggcctctagaaagatctatctttcatgggggattcctcatattaatttttctagttatcttctattttttgacagtgatttatatttgtgatttttaaaagttcctttttaggtatattaatttaagtttatttttaacttgttttaggaagtgagtcaattcaaagaaaatattaaggtggtgacagtgcacggtatgggtggcacatggagatggcagaggctgggaaggactaaagtttcagccactgcagctggaaactcctctcaagtttaaaatgtttgggtcaaggtgacactttcccgtctgtggtccctgctttcttaacactatcattcagaaaggccccaagtgtaggccgggcacgctggctcacgcctgtaatcccagcactttgggaggccgaggtgggtggatcgcgaggtcaggagatcgagaccatcctggctaacacggtgaaaacccatctgtactaaaaatacaaaaaattagccaggcgtggtggcgggcgcctgtagtcccagctactcaggaggctgaggcaggagaatggcgtgaacccaggaggcggagcttgcagtgagccgaaatcgcgccactgcactccagcctggccaatagagcragactccatctcaaaaaaaaaaaaaagccccaagtgggtaattcctttcctctaaggcagtaaccagaataaacccttctctatcaccaatgcatgatgcttccattatgtttcacctccctaatcttcagaacttggaagaatgagtttggtaatgttagactggaaactcagaccaaggaggctgtgttagtttcctgggactgatgtaaaaaagtacagcaaacttggtgactttaaacaacagaaatttactctctccggaggtggaagtctccagagagcctgcaaggtgttagcagagccgttctccctgagcctaggtagaattcttcctcacctcctcctggctttggtggtggccatccgtccttggcattctttggcttgtagccatgtcaccccaatctctgcctctgtcatcacatggccttgtccctgtatgtcttcatgcagctttttataaggacaccagtcacattggattgaggacccatataactccaatatgacctcatcttaactaatcacatccacaatgaccctatttccaaataaggccagagggtgacaactttaatatgtcctttggcggaacacaattcaatccatagcagaagtttactcaagcactcaagggctaggaaagaaaagattcatgactggccctatgtaaaaataaaacacctcagcataatgcaaataccatatgcaaaatcaaaagataaatgacaaactgggggaaatctttgcagttcatatgacaaaaaaagaggctggtttctccggcataggaaagagagttcctagaaattgatcagaaaacagtaacaataatccattagagaaatggatggaaggtatgaacaggcaattcacaggaaaggaaatacaaatgacttttaaatatttgaaaatatgttcgatctcacttaaaaaagagatatgcaattaaaatccacccataaaatcgagaacaatttcaaagtttatgaacatactctgctggtgaggctgtggggaaacagacactctcatctattgttaggaggagtgtgtgtcactacggtccttttggagggcagattggcgtggcccatccagattacaagtgcaccctcctttaatctagcaatctgttcctaggaatttactgcaattgtatgtgtgcaaagtagcacttgtaactcagtgtttattgcagccttatttgtaacagcagaagtttgggaactgtccaggtgctcacagataatagagaattggtcacataacttggtatctccatgcaatggaaaattatgcagctgtaaaacaaaatgaccatactttccaggcaccaatttgataaaaacccctggaaaaatattactgaaaggaggtaatatagcatgctactattcgtttaagaagcaagtgcggagtgaataagaatatacatccacatttgcttctgtttacataaagaaaatttgaaaggctacgcaagaaattaattattaggactaattaactattaattaggatttttccagagaaacagaaaaaaataggaaatatatacgtacacacatacagtgatatagagaggggggttgatttattataaaggattggttcatgcagtcattcaattatggaggctgagaaatctcatgatctgccatttgcaacctggagacccaggcaagccagtggtgtaattctgtcccatttcaaagacctgagaaccaaagaaactaatggtatcaatcacagttcaagggcaggggaagatgagatgagatgtcccagttcaagcaatgagacaggaaaagaagggagaaattccttcttcttcttccttttgttctgttcatgtcctcagtggattggatggtgcccacccactttggggagggccatgtactttactgagtccactgattcaaattctcatctcatccagaaacaccctcacagggatacctagaaataatgtttcatctgggcaccctgtggccaatcaagctgacatgtaaaattaaccatcacactaatgaaagtggctgtggagggtggtagggatagaaatgagacttttccactatatctctttataattttaatttttgaattatgtgactgccrtgcctaattaaaaataaatgcaacaccttgggtgtgggagcagagttgccgtgggctcactggttgctgcacacgttgctctgcatgtcctgggttccttttcctctggttgctccttcttagttattctgggggaaagcaggtgccatggggtacctgagactaataaataaatgcaggtcagcttgtggcccacagaggatggcccagcaggcatggggtgctgtgtcatgggcaaggacatgggccattcttcagtggcagtcattttccttgatgggagcccagaagtgctttgggaaggtagcctcgtgctgggcgtgtctgccctaagttgagtttaccaacacataggaaggtctgaaattcatttcagcacaagagcagaactgaccctgtgtgcttacattggaaatcacagatgccccttccctcagtcaggaaaattacccaggtcacctctggtgagcagaaggccttgcagaacaagtgctcagtggacagtgtgacatatgagccccgccgggatctcccgctgcagcagcgaggaagtagtgtggtgcagtggttacgtgttgcagtttcagagctgagttcacagcatggctgtattaatctgttctcacgctgctaataaatacatacctgagactaggtaatttataaagaaaaagaggtttaatggactcacagttccatgtgactggggaggcctcacaatcatggcagaaggcaaaagggcacatcttacatggcggcatgcaagagagaatgagagccaatcaaaaggggaaaccccttataaaactatcagatctcgtgagacttattcactaccacgagaacagtatggaggaaatcacccagatgattcaactatctcccactgggcccctcctacaacacgtgggaattatgggagctacagttcaagatgagatttgggtggggacacagccaaaccatatcaatgccctgccctcttactaaacgtgtgaccttgggcaggtcactcagctctttaaccctataggttttgtcacctataaaatacgagtcgctagtacctgtctccaaaggtgtatgaggatcgggtgaggtaatgcagtgaagtgcacatagtaaccctaaccgtgacccgaatcaatagaacacttagaattatcacaaacaataataacagataatactcatgtagcatttactatgctgcagacactgttttaagctctccaactatatttactctccctgcaactctgtgaagtaggtattgtaattattctcactttacaagtgaggaacagagacataaagggtaaatgtcttgccctacattactcagctctgcactggaggaggtgggatttgaacctaggtggtctggctcagagactgcttttactgacttcatcactgtgttcagtgagttccaggacgtgagtttgaataaatggaaaaatgggaacctgaaaccctcagcaaagtctgctgtgagcatgtgtctctgatctttcaagtactgctttggccactcttaagcttcgtgaaccttattttcctcatacataaatgggaggrgagtagtaatgacatctactatttattaatcacctgctgagcatcagrggctgtgatgagtgccttacaggtctcattttttcctcactggagccctataagataagtactgttttccccattttatagacaaagagactgaggttcagagaggcccagaaatcttaggcagccagtaaatgccagaaacagaagttgaagccaagtctgtttgatgccagagcctgggcccatcaccaccccctggactctgtgccctccgggagctgttgcaaagatgagagttatttttctgtgtggtgcctggcacacagtgccrgtgtgcaaaatcaccaacgcttggattgtcgatgtaacatttgctcacggaaagctgacctcacccatgttgaagctccctttcctcatctgctgagtcaggatgcagatggggtggctttcagggactgctatacagacagagttctagaaggttgtgtggcccggaagcggtgctgtgccgatgttaggggcctctacctctgaactacaagcaaattctcccctccaacaagagcacattgtgttctggccccrgtctcccactaaggctactttaaatgcagatccttctgccaacagctacttttagcaagggcagactatcataaggagagaaacttgcaagaaaatagcaaaatggaagcattgttcccgagggtttggagcaggctcagggaacggtggggtgggagagccctggagacgtgctttgccatcacaaataagttgtgcaaaaaaaaaaaaaaaaaaaagaagaaaagaaaattcacttaaagtttttcctgaaacctggaaggaggagagggcagacaaaactaactttggaaggatttaaactgctatagtcctgtggaagcttctctgaaggaactgggaactgtttatagcaggagaattgcatcttgaggctggagggagcacagggctattgatggatgagtccctagtaacacgggaagatgggaggcaggagaaaaagcttgtggactgagaaggggcttttttttttgaggaaatttgtgttctcagggatgaactagggccatatgataaaagattgcaaggatggtttcaacttcacaccatttagagcctctggcactatgaggaggttggctcrtgcagtagtgagtggactgtcctcagaagcatgcaagcagagcccgggtgatgatacagggagtccagctttaagataggacacaggacttgagcagaggctcataaacactgggccttgtgcagggtccgctctgtgccagctctcacactcatccatgatgaaatgagagcaaagaggactgaggctgggtgcggtggctcacatctgtaatcctagtgcattgagagaccgaggtgagaggattgtttgagcccagcctggccaacatagtgagacactgtctcttaaaaaaaaaaaaattgagtagtgagattttaatccaagaagactgttccttgagactacacccttcctaaacttaggtgttcaaatgctctttataaaatgacccgtctgtaaaagcctggaaatattgggattagataatgtccaagtcttttccattgctaagattttgtgattctaggaaaatatgtttctgatttggatgaaacagaataggaggagcgtaaaagcaagcctaaaactgacacatcaagaaatggccatgtcagcctaccagttagagatgcagagttacttaccaggaggaacagttacaagttgactgtggtcctcctgaagaacagggctggaggtgagattttgcrtaagtatcaattctgcattggtatataaattttaaaatgacatgcatgtactatatgacctttggttaacactaaaacttttaaaaaataaaagacaggtaataattatagctgccctttactggattctgtgctaaaggctttttataatattatttcctttaattaatcccatcttagggatgaggaaacaggctcagaaaggtgaagttacttactttgctgtgcagacagggtgaatttcaggtttttttgacktgagaatccaaaccagatgcatatacacgaagctcagttgtcctctgccagggtgagacttctgtggggcttcaggagaggaagaggatggggggatgtgggggtaatgctatagaaagcaccagaagataactggaagagagatgatgacaaaaaagggggtcctggttaggtttcttgatcaaacatcttgaggaattcagcagcttgtcataaactaaaaaaaggcacacttgcacattaaaagagaaataattaaacagttgcatgagacacttatgttcctttctcccctcaatttggatttgatgggagggaggccacatgggaggaagcaagctgtttggacgcgttgactctgtgccaggcactgtgccaggaaccttatggaaatatcagcccatctagtcttcgccatgactctgagaaataatattaaccaagaacgtcacttaggaatgcctaccgtagggtctctcagcttcagccctgctgatatttgggaacagatcattatctgttgtgggaggctggcacccattaggtgccagtgtgataaccaaaaacgtctccacacattgtcaggtgccctcagggagtcaaactcacctccaattgagaaccactgtcctcagatractaggcatgtcatatatattatcttgagtcaccctgccagctagctgtcatgatgcccactttgtaaatgaagacactgaggctgagagaaggctgacatcattgtcagtagcagggctaagaactgtgccacgtgttttcaatactgaatttagagaagcagcaaatgaagaccccggcccagttaaccttgggctaacactaaaatatagattgtatcttctcttttttaaccacagtgaatgtcttagaggaggggctggtgtttcattatgttttgtttgtttgtttgtttgttgtttttaagtamgctggcgacatggcacaggctctggaaccaagcaccttcactyattatctctgaaaccctggcatgttacttaacctctttggctctcagttttcttctctgtaaaatggaactaatgattatacctcctcatagggttgtttggggatgaaatgagatcacgtgagcgaagcagtgcctggcagatagagactcagcatcaacaaatgtgagctgtcattcttacgagcaagtttttaaatccatttcacatactcagacctggaagtggccccagtggcatcattcagggcaccatctctggggtggctgactctgcttctttgcagtcaagcccaggggttgtaattcatgtcggattttcgctgaccactgagcaatcccctctgggctgcaggagtagccggatttggcttgagcgtccagaggagaagccgtccaagctgatcaagcatttgccttctccaccaataggagtctcaggagaattatggaactgtctttgcacatggaagagattaattcgtgtggccacaaatagcttgaacactgtgtcctcagcgctgtgatctagtatcccctgaaatttacacagggtgccagcccggcagccagaaaagccacaggaccgtcttaagctgcccagcgctcctagccgggggacccctcaggaatttcagagggtggggacaagattaagtcgtttgtttttcatttcatccrcctacctcgccccccgcctaataagcctgctttctggcctcccgtttatcagccaaatggaatgatygtgcaccccccatccccgggtttgcacctccaggctcagtccrtctacttcctccacctggcgtaccctcttttatggtcatgctcaccttccagtctctgcatagctaaatgccaccatcctccaagcctagtgccaccacctctgctccccccaccaagtggtacatggctttaaaggatgtgggctctggaatagagtttaaaccccagctctgttagatgtaggtgaggggtgatatggtttggctttgtgtccccacccaaatctcatcttgaattgtaattcccatgtgccaagggagggacctggtgggaggtgattggatcttgggggcattttctcccatgctggtctggtgatagtgagtgagtgttcatgagagctgatgctgttaaagtgtttggcactggccaggtgcggtggctcaagcctgtaatcccggcactttgggaggcggaggtgggtgaatcatctgaggtcaggagttcgagaccagcctggccaatgtggcgaaaccctgtctctagtaaaaatacaaaaaaaatcagccaggcgtggtggcgggtgcctgtattcctagctacgtggatggctgaggcaggagaatcgcttgaacccaggaggcagaggttgcagtgagccgagatcgagccactgcactccagctgagcaacagagtgagcctctgtctcaaaaaatattaaaaaataaagtgtttggcagtctccctcaccacgaccaccccctctctgtcctgccactgtgtaagatgtgtcttgcttcccctttcccttccaacatgattgtgtttcctgaggcctccccagccacgcagaactgtgagtcaattaaacctcctttatttataaattactgtctcaggtatatctttatagctgtgtgagaacagactaatacaaggggcttactttcctgtgaacctcagtttttgcccctataggtggaatactaatggctgattaattcctgcctcatcagatcatttgagatttaaaccagaaaaggcagactaggtgcttggctccctgctgagaacgtagtaaggactccctcgatgtgagctcagggcaggtcaggcaggtagctggcctagacagctggggcaggaggagaacatccgtgcaaagaggctagaggccctcagcagcagcgtggtggcagctgttggatcggctggccacacttccacagatctggcccataaggagacaacactccagatggatgtaggtgggttcttacttcacagtgggcaagatcaggttggtgttggctcccacatcctagtcccacagggtgaccccaaactggaagggccagacaacagatggcatcagtggtgggtcactctgttattgaggaagcaactctggacacagctaagtggttttgtagtcttcatctgtaccaaagtggggcaagatggaaagcgccaagtctcactagaacgagggaggccgatgagaaatgaccgtgctacagctcctcacaggactgctgtcttgcagcaccccacgcaggatcctagggccttccgtcaagatttgggttggactgtgctttagtcttgcctatggggcttttgcagaaatacacaaggtcaccggggcccagagagtaatgagagaggcaggaagacatttgtgctcacctagaacagtgcctggcacattgtatatgctcaattaaaaagtgttggatgaatgaatgaatttaccccacagtatttaacaaacccctgcctggagcaggccctgttctggttgctgggaatttggagataagtgaggcttagcccatgctctcaagacctcacgtgacagtgccagagatgcttcaactgatcattagcaaagtgttctgagatctctgaaaaagctaagcatggctcggaggcactgacagtggagtgtctgcatttatgagagcattttgggtggcaattggcagaaatgtcaaagccgttgaaacaaacaaaagaaagagacttaattggctcatgaaactgaaatgctacctgcaggcatggctgtatccaggcactcaaacaacatcaacatagtctctctctctcaccccgtccccactcacccatgtctcttggctctgttttcctctgtgtcaccttcctcctggccagcttcctycgtcgtggtggtccccagcccttctaggtgttcatcatcctgaggactggcagtggcagcagaaagagggctcctctttcccagtagctctcccagaattcaaggattgactcaaactagcccagttaggtcgtgggcacatccctccacaaatagcactgtgggacgcgaaagtgatcagctccatccaaaggatgtggagggagggtgaagcgggagaggctctccaagggaaagtgaggatgctgctagggaagaggaggtggatgctgggcaggtacagacaacagatgtccactagatccacctagaagaccgttcattcaaacttgattatgtgcactgggtggaaatttattggatgggacaggggaaatagaatgggaggaagggaatctctggcagagagaacagcatgagcaaaggcccagagggagagaagtggatcacaaggaattggaccaggagatgggtaggtggttgaggttggaggattgagcagaggccagatgattgaaatccttgaatgtcaagtgattcaaagaggaaagagctatggttagatttgcatttttaaattcattcatccaacacatatttactgagcaactactatgtgaataagcaaagtccctgattatattctaatcataccctagggtagtgctaggaagcaagactggagacgctgagtctggaggcagggagagggaggaggttgcgcaccagtctagacgggagtggctaagacttagctggggcgtggagcacatttcccctgcatcagctctactcagggccaaacctttgctatgtagagtgagtgcaggaagcagatctccaggctcttgtgtgatgctccaccagggcagcctgctgggaacatttttgtagcatctgtttgcacaggctgtcaccaacagaattagcctagatttgaatccttgctgtcccatgcactggctgtgtgacctgccgcacctctctgggcctcagtctcctctgttaaatgactttgtgctggcacctactttgcagagttgtcatgacgattaaatgggatagtgtttggcgcctaagaagtgctcaataaatgacgatgttattaattactattgttactgtgactgtcttcaagggacatccactcctgaaactcatcttcctctcttggaaactgggcaccatgatagcaagtgccttagtggaatggtaatccacttagtggccatgtgaccttgtgcacatgacgtcacctctctgtgccttggactcctcatgggaaaaaatggggctaatattagtacctgcttacagggctgttatatgaattaaataaatcatggtaagtcctgaggagagttcctggcacgtagtaaactctcaataaatgtcaaataaataattattattatgtatttgtaatattatgttgcaatagttcgttatattaatataatatgttataataacatagattatattatattgcaacatcataataataagtattattattcggtagtagtagtttagattgaccatctgcaatctgaaaatctgaaatgcaaaatactccaaaatctgaaactttttgagtgctgacatgcggctcaagggcagtgctcacgggagcattttggattttggattttcagattcagagtgctcaactgctgagtgtatatataatgcaaatattccaaagtctgaaaaagtctgaaatcctaaacacttccagtcccatgcatttgggataagggctggtcagcctatagtatgttattaacaaggaggggttaatgatgacatttaaaaaaagccttattaggccaggtgcagtggttcacgcctataatcccagcacttgggaggcctaggcaggcagatcgcctgaggccaggagttcaagaccatcctggttaacatggcaaaaccctgcctgtactaaaaatacaaaaattagctgggtgtggtggcacacgcttgtagtcccagctactcggaaggctgacgcaggaaaatcgcttgaacccgggaggcagaggttgcagtgggccaacatcacgccatggccctccagcttgggtgacagagcaagaatccgtctcaataaaaataaatgaataaatagcccttattaaatggctgttctcagaatcatcatcattatccattagacacttagagggaaaatgactgcatttgggtttggggataaaagggccaccatttcctcccacaaaggcaggtgtctttctctcagaacacgtggttattaaatattgctgttattaatattgtgaaacgacatcagactcaaacccttctcccagcagaacaggagaaggaggctggctcccctcccctgatctgtttctcctaggctgaccggaggggtgtcccgtcccccgctttccctcgacggttctgtaactccccagaaggccatcccagctggcactttagttttgcrrttcggggatttcttttctgcctcatgcctggaataatttgtggctccatttacaagagcagagcccttgtgttcaagcccgctcgggtcccagaagcagtgatgcctggaaagcagtttggaaaggtcagctcggggcgcagtccaaagtgattttaagtgccccagctaagtgccggccagaatggggagcgcttttaatctataagccttgccctgtgaagaaagagacaacactgctctgaagcagtttgactgcaaagtaataaatccctttgtgtatataaaaagtacagacgtatctagctcacatttcagaagaaaaaaaaatctctgcagttagggcattggagttgaactcatgtacatgaatctatgggaggaacttcatcgagaaaaaggagtttataatcgtcatacatttttaatttacaagratttgttctgagactgcctgagatcacagtttcytaagctgtgtgtccttgagccagttgcttcacttctctgtgtctcatctgtatagtgggaagagtgagtactcacttttgggttgttgtaaaaattaaatgaattactagctgtaatgcatttaggatagtgcctggaacagtgtacacacttaataagggttagttactattatcttatagtacagatttttgttttaggattggcggcgattttctgcctggcacacaggaaagccagtctacagagtggccctgttgtttgcaacagaaacctataattgtctgtttctccttggttttctgggttgagagtccaatgcacacatttcatcatgccttgatttttttttttttttttttgtcctttttaaatccaacctttcaggacgtacttccagcaaggcaatttggaattcttgaattccagagagacctttccggccacattagctaacagaggaacttttcaaaaccaagagaagcttgcaaaccactggttagaaaatcaactcattcattcattcattctacaaatatttcttgtgggcttactatttgccaggtctgcgtgccaggctcaggggtttcaaagagagcatggcatattaaaggtgtatcctatggggagccaggccctgatttaagagctgtgtatacatcaatccactcaccacaatcctatgagatcgatcttatcttatccccattgcacagacgcagaaactgaggcaaagagaggttaagtatccctaaggacacacagctggtaaataaagtccagattcaaatcgaggcagctcagctccaaaatttgtactcttctctttttctccccagctctttaatttggaaaatttcaaacctacagaaaatgtaccagtatggcacagtgaacatcatatatttgtgccattgacgtagtcattgtttaaagcttcccacattttctttaccctttcctttctctgtaaatttttgtgaaaccatragagttacttgcaaacatgatgattcttcaccccaaaatacttcagcatgtgcagtagtatctattactgcataacaagttaccccaaactttaatagataaaaaaacaagtatttattatatcatatctgtaggtcaggaatctgggagcagctgagctggtcctccactcagggtctctcatgaggctataatcaaagtgtgagctggggctgccttcacatcaggcatggtggagctcatgcatgtagctgttgattggaggcctcagttcctccccacataggcctcttcatggggctggggctgctcatgacacattggctgacttccctgaaagcaagtggagagagagagaggaagagaggaagagagggagcaagaagcctggatggatgccacagtgttttatgtcagtgtttatgtcagagtgacataccatcacttctgccatattctattggtcacacagaccaacccaggtactgtgtgggaggggactacacgggggtgtgaagaccagggaggcagagaccactggagtatcttggatgctggtgaccacagtgtrtttctctgaatgatgaggacattctcctacaaaacaaccgtactatgaccacacattaatactgtactactacctaacattcactctgtattcaaattctcccagatgtctcaataatgtcttttttaatcagtctagatccattccactttcttgacataagaacaggttgattgcccttttgggaaacactccttccccactctcagtccacctagttcaggaggggccrattctgatgccccagccatgggtaggcttatggctcagatccagctagtgaacactcagcattgccctggtgacagcgattggttcagggatcagcatgtgaccsaagctgggccaatcagaataattcctgaattttagctgggactgttaaggaaaaggcaccatctcaccactagggttgcagagctggtagggtcagattaaagacactgggagccatcttttctagcagcttgcaggagaggcttcctgagaatgaactcaaggtggtagaaagcaaacctgagtgatagagatggggggaggggagacaragagagataatgactttatttttatttttttattttttttcaaaaatcccttgatcaagctatgtctgaagctaactacccctaggggttccagttatgtgagtcaataagttcccctttttatttaagccaatttgagctaaagttcttgttatttgcaacagaaagggtcctgactaatacatgcatcttccagggaaagaaaatgacttactgtaaatccttaacacagaaactaatttgcagtagaagtgtgctatgaggaagcaggactgatattcttagaaattagagttgttttgtctcctctatttgtaagagtctaacagatgacacagcaaaatctccagccctcctaccttccataaygggtttgctcatccatggaagttcatgaagttccagttatgccacttattactgctgtgaccttggctaagtcatttaacctctctaagcctcagtttactcatctatgaaacagatatattattaagacataaaataaggggagagtaaaataagatagggcatgttaagcatagggacagtactgagcatatagtaagtgctcaataaaatgtagccattcatagcagttctaagatgaaaaacctactacgtgcgaggatcttgcaaagatacacaagaaatataataggcctacctgaggatgtcagaaatcttcatggaggaagaaaggctcaatctggcccttccaggattcactcaaatttaaaaacataagcagatgaatagaggtrggcttcctacaaagaatgtgcaggaacacaagtcaataataagaacagctgagatgtattgagcacttactgtgtgccaggcatagctgtaagtgcttttcacacatcaactcacataatagttgaggtcctcccagcccttgaggtggggattgtgatggacagttttgcagacaaggacacagaagcccagagaggtcaaatcatttgctcaaggtaactctggtcctgtgtggagagccaggattcagaccccaggtgcctgaattcagagcccgcatccttaactgctctgccaacgctactgttgcttataaaacgtaagtgataacaaygacggcagttacagaggccacatatctatgccacagatacaaaacccaaatgatatggatatcaaagaaaaggcacaaaggccacccatgcagccaggaccaaggcccaggtctgtgggcctcttgtccctgaggggttaaatgttctgttctgtgagagtggccaggaccaagcacagcgctccgggagggaaggtgacaggccagctcagggcggtggccaaagctccaggcagctggtggcatcgggggctatggccagctgtctcctgctgaccaggcctgagcacccccaggcctctcaccagcaagacctccacagctgtcagaggggaacagtgcttgccatccacgggcaacccgcagaacggggccagtgaccccgggrtgaaaggtttgcctgccgggcccctagcctcctgactccatctgtctcgccacctgcaagcaccatttctgactttttcctttggtataaatggggaggcaactaygaaatcaacagygggaaaggtgcaagaggccccatcttcccagagcccgagcctgctggctgttgagacgtataggctgagaaggctggacaggggacgctgactaggggaccyccgtgctggatggtgccatgggtagggctgtcttkgaatcccacagacccacattcaaatcctggctttgcccctaagagctgcctgagctcaggtgagccatgcaccctrtcacatctctcctctgtaaaatgggcacagcccacctcacagaggagctggaaggatgtaatgaggtgccttcagtttccctcaaggtctaggagggtgttaagtccaccggaagtagaacgaaactcctaagtcgattcccggctcttctgctcctcagctgtgtggcctttcatagcctccttcatctttctggggctcagtttcaaaatccgcaaactaaggggcatgatatccatctgacagggttactgtgagaaattcaatgcatttctatgtgtaaagtgcctggacttcagtaaacactattaaaagaagcagtaacagagtggttaaaggctctgayatttacctgctgtgtgatgttgagcaagttaccttccctctctgtgcctcagtttcctcacatgtatcatggagatactcatgcccttatcttaaaggcttgtcctgagggttagatgagacattataaaggcctttggagcttagcaggtggcgggtacatgatagacatgggttcttttttcttttttttttcttgagacaaagtctcactctgtgatccaggctggagtgcagtggtgccattatagctcactgtagcctcaaactcctgggctcaaggaactctccaacctcagcctcctgagcagctgagactacaggcacatgccaccacctagctaatttttaaatttttttgcagagatgggatctcactatgtcgcccagctggtctcaaactcctgggttcaagtgatccttttgcctcagcctcccaaagtgttgaggtcacacacgtgagcccctgtgcctggcctagacgtgggttctgaattttacaaaagtgcttggcaacgaatgttactgagttcttattagtaacatgttttctgttactagccctcctcaccaaggagtgggtggtggacaacctaaggaaagatacctttttattttattttattttattttttactttttttctttagacaaagtctcactctgtcacccaggctggagtgcagttgtacaattacagctcactgcagccttgacctcctgggcttaagtgatcttcccacctcagcctcctgagtagttgggactacaagtgtgcaccaccacccctagctaatttttgtattttttgtaaagacagggtattgctgtgttgtaccatttttagggggggaaaactctcttagagaaaagatggggaatggggcaagaggtctcctcacatttagagacatttttgtgtagttgtgtagtgtgggtgccatcctaaaagggaacacctcaaaagcctccaaagagagttatgcagatgtgacttacccacatggcccagctttcgagggatcacacagctgggctctggagtggatctgtgtcccttctctgactctcctgtgtgacttgggcaaggccagccacttaacctcaccaagccaggtcccatcatctatgaaatgaggacactgacagacctgcctcattgggagggttctctgttttgttttttgtttgtttatttgtttgttttgacagggagtcttgctgtcgcctaggctggagtgcaatggcacgatctcggctcactacaacctcctcctccccggttcaagcgattctcctgtctcagcctcctgagtwgctaggattacagacacgtgctaccacgtctggctaatttttgtatttttagtagagacggagtttcaccatgttggccaggctgctctcaaactcctgacctcaagtgatctgcccgcctcggcctcccaaagtgctgggattatgggcrtgagccwgcgctcccggctggttctctgaattaatcggtgcagagcagtgattcccaaccaggagtgactctgcccccgagggkacatttgacagcatctgtagacatttggctgtcacatctagaggggaggcgtgctgcgggcgcctagtgggtagaggtcagggttgctgccaaacatcctacgatgcacaggacatcccccaccccgcccccagcactcaccaacaacaaaggaccatccactctgaatgtcagtaatgtcgatagacatcctcacgtagagtattggcttcagcatagtgccagtaaaaggaagtgcttgtgtttgttgaatgactaaatgaacttgctcactgcaagtctcagcttctcctggcatggagaaaatgtatctctctcccagagttgttgtgagatcaatgagaaatacgccagcctgagggcctctctggggccctgggaactgctgttggatgttgaatgaatatcatagcaagggaacattcggagtctcagatctgggatttgggcaggagggttcacccaggaggccagcttgcctgtgtgtagcatgtagttcttccagctgaaactgtttctccctgaaggatttcaagcacgacatatacccaaactaaagaggatggcagcaaaacgtgcagaaggaagctrggttggattcagcctccgtgctcccgccttgctcatctccaaagctgtaagaatttaagggaaacttaccccatgttttgttgcctcatttgtgcataattcatcaaaatgctgttctgtaaaagaacttctctgtggcttgaaaccctttgcacacttgtatcttttcctgcgctctctttttcttttatatctctccctctctctccccctttctttctcattaaaaagatgmcttttctctcaagtgcaagaagctgacttgtgccaaaaacaagcagggtggatgctgaaagttcccagggttagcctggagcctcccaaccctagaccttgagcaacctcccagcttaagtaaaatcctcctccctgctctgctccccctggatggctctggggagtcccaggaatggccaggacagagggagccaggtgagggcctggctgctcccaggaaagagaggatgtcatggtcctgttttggccaagcaggtcstgttttggccaaccagtgctcccgtgcgcagatccctgtggtgatgggagacaattgcaagggtcaggrttcgagacaagatrctcaaaagtcccttccagtggtgggcacctgactccagggcgggttcgtaagggctgcggtagcttcggggcaggtgcagcctcggtctcctcacctgggcagtgggaataaaggggtctattcagattgttsggatgagcagtcagtgaggaggaggatgtgaggtgtgtgggtgctgggcactacaccaagcactcagggcatgcaagccaccagtgtccctgcatcttcagggcactttctgaacctcagcaccttcctctccaaaatgaraaaaacagcacccgctccatagtgtygttgagaggattcaacaagctccttgctacaaagcccccagtaggacctggcatataattcctgttttgaaaatgtttgtgtatgtctcacatcttacctaattcatgcccctgcctgctcataccaagaacaggtatccagtaaaaagggagaagagtgtaaaaggtgaagatgctacatttattttttcctggcaattcatttgattttttaaaaagaggccacatgttggtggctcattcctacaatcccagcactttgtgaggccgaggcgggcggatctcttgagcccagtagtttgagaccagcctgggcaacatggcaaaaccccgtctctacaaaaaatacaaaaattagccaggcgcggtggtgcctgcrtgtagtcctagctactcaggaggctggagcaggaggatcacgtgagcctgggaggtagaggttgcagtgagcctagatcaagccactccactccagcctgagtgacagtctgggtgacagagtgagaccttgtctggaaaaaaaaaaaaaggttgcagttcgcaataggaaggtcctttctttatttgggtagccttagcctcrctggacctcagtttcctcatctgtaaaatggggataattataatacctgcatrgcagaggtattgtggattaaatgagagcttttgtataaagtacttaggacagtgcctggcagttcgtaagtgctgttttaagagttcrccacattcagccagagtggacagtagactgaccgatttttagaaagcccaaattccctgtgtttaaccagctctaaaacatctcaggaacctaagcagcctctcttgtacctcaggtgtttctgtcctgtgaaaaaggaatgaatttgctggccgcctatggagttcccacagttgcgctgcttagtgtttgctaagccctcagagccctgcggaaatgcaggctgctacaaatgctattaccagaatccacattccccagagctctttggagatttgggaagcttgggtttgtttggacttttcatgactcgactctggtcatcgttagggcgtttgatgatcttagacggaatctgcctttcacctctgtggcctgctgggcccttctgggcgtgttacaggaagggaatgcatcattgctcctatctgcctagtcagcttttgtaacaagctcttgatatgatgattttgtgcttgggtaagcttttcagaccttctgcggctctttgctgcagaaggtggaggtactgggacaatcaaatcaagccatcagctgttgacagtgggcctggcaaggtctcacggtgcagaagacactgagctgtctcacgctggcttgcagtttggtatgtgggatccggtgtgcctgggatgagagcacactcgcaacccaagagggtctgaaaccctaagcactcttcgagggtcttgagaataagtactgacctcaggatctgggtccctttcccagtgggggttagagtctcagtggccttggttgtcctcctccagtgcctgtttatatttgaacttcttcctcctctggacctcacccattggatccctgcaggattgctggaccctctgccaagactggccatcagcgggagggctgcttccctccctacttctaagctcaaagccctaggaggtcttgcccgtggagacgaggtacatggctttgtgttttattgccatttattgttcttgttattttaacatttatggagcacgttttagctgtgaactcatttcttgagcatcactgcggtcaaaatctccccagggtgcagggccaagggttactttgattctttttttggctgttgccctatttactttattaaaaatatcattgtgcgaggggctccctttgttctaagaacttttctggacatgaccctgggtccaccctaagcccctgattaccatcatttgaacatgagcctgggtatgagtaaggccatataggccagcggtcagcaaacattttctgtaaaggaccatgtcataaatatttttggctttgggggcctctgctgtaactactcaactctgctcttatcacataaaagccgccatagacagtatataactgaataaaactttatatacaaaaccagacagcagccagaatttggcccatgggccatagtttactgactgccccctccccrcccacccaayrtagatgatggggctttgttctacgaactcccttttagttcttccatagatctaaagagtcagttcttcttactgcagttttggcctgtttctacttctttgtttgatcccctagagcgtgagttggcaaactgaggccaacagctcaaacctggccagttgcctgttttgtaaataaagttttattggaaagcagccacacccattcattctgtrttatctatggctgctttcccactacaacagcagagctgagaagtggcgtcagagacctcttggcccccaaagcctaaaatatttcccatctagctcttcacagaaaagcttgctgacctctactctaaagagttgaggaatggctggctgagaagcagacttttttttgcatgtacatgaagagcattactaaccctcccaaactcatcttagaacttttctcccaggttctcttgtctagtctttcaaatattttagatgttattctctggaatctaagtttttttttttttccaaagttccagaccactgtttttaaacaactttggactgtgatcctcataaaggacatattttatatgtcacccctgtaatgacatacaataaactgcatacacacagatgtccccaccacacacacaaaccacacaaaacacatacagaaatgaaagttttaagaaacaatgcttgccttactatatgtgataagctctcgtattttctatgaacaccagtcaggatcagcttgatgatgctgtggtaacaagtaaccccaaatctgagtgccttaaatcaayagacatttatttattgctcctgctccacgtttgccctggatcactggggatcctgaaggagcagaacatcacacactgatctccaagtstctgacaagagtggtactcaccatttctttgaatatttctttggtcaaagcagctcacatgaccataactttcaatagagtgaagaagtgcagccctactgtggacccagaaggtgaatctgagatatttggtcaacagcattaagataactaccatatggctgggcatggtgtctcctgcctataatcccagcacttttagaggccaaggtgggaggatctcttaaagctaggagttccagaccagcttaggcaacatagtgagacctcatgtctacaaaaagttttaaaactagccttgcatggtggtgcatgcctgtagtcccagccactcaggaggctgatgtgggaggatcgcttgagcccaggaggtcaaggccatggtgagctatgatctgcactccagcctgggcagcagagtgagaccttgtctcaaaaaaaaaaaaaaagaaaaagaaaaaagaaaacaaaagaaaaaaattactaccatattagtctatcccaggagttggcaaactttttctggaaagggccaaatgctaactatttttggctttgcgggccataccatctctgtcacaactattcagtgcwgcagttgtcacgtaaaaacagtcagagacaacatgtaaacaaatgggcttatctgtgttccagtaaaacwttatttataaaagcaggcggtgggctgggtttggctcataggctgtgggttgccaaccctggtctactctatttcttttttgaaaaacactggtcacagctcactaaactgattttattaacccatctatgggtgagactctatagtttgaaaaccccaagtgacgataagctgcataagatgagggactaatatttcttatcagctgtatcctcggtgcccagtacagggttagtgctgagtaaacattgttgaaagaagccactgaaaatcctctccaactgtttttctggtgataaatactctgttcaagatgcatacgttattgtgtttctctcgtaaggttgcctggaaaaaaacaaaataaaataaagctgcacacattattgtttaattcgtaaaaggttgaccctactttcaaggtaactgtcagttccaaacttagagacacaagtattatgttcacttctctaagagcacygttcttcattcaagcttgagatgatmgctccataaatgtagtgttgaaatctatrcttgtggaaacccaggtcattgtatatctgttttcttcrtatatatttattatttattgtgtcagggaaaatacatgcactatctcatttaattttctcaaaaattgcaggaggtgggtgctaatgttaytcgcattgtacagatgaggaaactgcagctcagaggaatatgcccagtgtcttggagctcaagactggtagagatgggattggagcagagtctctgactccagaatatggggtgtttgatcatttggctatggtgtctctgggacatgccaccacataccaagacctactcaagtgcaaggtctttaaatgctattggcagttgaggccatgttttaagtcstcttagaaagacactatattgtgcttcataagatgatacaaaacatacatgagcckgttccttttatgggaaaatctgaagttaacagtgagattggggagtggggagggtttaacactttaacagctgtcctgctaagtgtgagagtaagtcaggccaaacctagtctcacagtcaagactttcaggtaaaagtaatagagaactcaagtcaaactggttcagcaagtaaagagaatttaggggatcaaggaactgagagtccagggtcagagctcagttcaggtatagctggatcagggttgctgatgcagtcaggatttcagttgttttctgactcttgacttgttttgttcttctccacgttttgggtttaacctcagcctgcacatggagctagatggtggggtaactgagccacaccctctaaggcacatagtaggtgctcaccaaatatttattgaatggatggactgctcaagattggcttaaaagcttgatacttttatgtagstgttaggttggtatgcattttaagatttgtgtgtatctgtctgtgtgtagcccagaggttaagagtggaagcacattgctttggttgcaacccttggctgtgccacttacccactgtgtgacttttggcaagggtcccaaccccagttctgcacctgcaactgccctatgaagtaggtagtatcattttgcatctatgatgcacaaggatagcatgacacaaagaggctgaggtgcttgcacaaggtgatttatggagctgggtgtgcaccttggcattctggttccatagcctgtgtttttctccactgtgcatgcaaagtgctcaacacagtgcctggcacagagtaagctcccagtaatcaaaagagccatcaatccaggctcgtttaaaggtggtggtggacagggcaagggtttctcccaggataacaygtagtgaagcatggagttgagtgatataaaaaataatcactttcctagagtctgggagaactgaattattatttcccagctgccactaatctgcagggggaccttgcagcratgttyccctctcagacagagactcaattttcacaaccataaaataatctaaggagtctcaagtacccttctagccctgatattctaagagtctgtgacttgatgatgcctgtgagtttggaggtctcatggctgggcactgagtttccaagattgcacatggtttggggtgctggagctgtggggaaatcatgaggagtcactctgcagcatctgttccctgctcctccttctgggtgctcctccaccaaggggcaggaaagcccaaactcccttgcagctaggtttctaggagtaatggaacattaagcaggcacatgcgcttccttgaaattcagaaggcggaggtcgtactcaaattgcctctgccgtgttggttgtttctgtcactgtgcagagtctggagtagtttggcttgctgcacagctttagcagaggccccagcgagcaggcactagctttatgtgtgttgagaggcatggtgtctttgtgtgggttcccaagaagctgacctcaagatcagggctccagtgccaatagttcatttaagaggtgactccaagaaacaccagaatgggaataaagaaggaaggcatgaagcgaaggaaagtaacagagggtgtgtgatccagcaggttactccctgagcatctaaggctacaccctgatgggaaagggcttataacacgtgccgctgagtaatccctccttaggggtgagggagctggggtctttataccccacatatgccagaaagagccttcaggtaaaacattgcacttgctgccrtttggaagttggatggttttcatggaaatggtatttgccgaagggatttaggcaaggtagtgacagcatcagccacrcagggcacagggcatccttgttgcttgtaaggattctggcaagtgtgataaggtcatgaggctggcacattagtggaatggtttcctgatagagatatccacaaggtgcctatcatggagggattttttctgtaaccagcagctttctggtcacagcacatgtagcagtaaccagttgtctggtgtcgctttggcattccctaaagcttatcctagcgtctgtgcccccaacctccccagaaattctctaagtcgtttgctagcctgaattaaccccttcctgcttaagctagctgtagtgggttctaccctctgcaactaaactctggttgataccagttataacctacatcctgggtctgctggacaagcagaagagtgccagtcactgaggattagaacaaagttcccacaacagccctgaagggcaaccrggctatgcacttctacatcatgggccaccagggagctgagtaataaaaccacwctcaggcrtcagargactcagattcttgtcccagctcccccactaacctgctgtgggaccttatacaggtaattttcrtcatctgaacttcaagtgactaatctgtggcccaggcaggagaggatgggggcgagagtgtggatttcaggatcagatgggccaagttcaacctctcagagcctaagttccttcatttgtgaaacagggataacagggttcccagagaaatattcagaagcatcagagcctctctgaagaattctgccacctcctgacattgtcagtttccctctctccctcttccttcctctctcttaacaaatatttattatgctcctacttataccaggcatgactattggtgttgaaagcccacaagtctctctttctgtgaatcatagtttctggagggtagagacagacaagaaacagacaaaggcacgtgtgtaatgaatgtgtccgggggtgagaaatgcaatggagaagaactccgccgagcaatggggcaggagtagtgagggaccctccttaaggtagggtggtcagggaggtctctctggcwgaggcctgagaggggcagggagagccgtgggcatgtctgaaaggagagcatgcttggtgggggatggggcttgagggaccaccactaggaggccagtgtgagagatggagggtggcgggatctgagctccagaagtcaggggcgggatcagacagggcctcatgggttgcgcttggctctttagattttactctgagcaagccagaagctggcctcatttaacctccttttagaaatcggtgtgatgaatcaatagctttggccgtwtgttcatcagtcattcattcattcaacaaggatttgttgagcacctcctttgtgcagctctgtgcttttctagttcctctgctgaacagtgaagggcagagcaagcacccaccggaataaggagggagttgggcattttgctagagctcctgtttggtccagaggccgcacacaatggaaaagtaaagcctggtcccctccgcaggccaccccgcacctggaggcatcacctggagctcttcctggcaggctgaggcctgcgagttcagccccactggcttccccggggcaggggttgcccacgcttgctgaaataagaacctcataccagatcagccccgcatcccaagcagggcaccctaaggatgcttttatgtaagaggttgcattcccaattatcttaagatgcaaagtgaaggtgttttgcccagggaaactctctatcaggagtcgttgcacatctaaacacrtgaaaaatgagacttcctgaaacattcctatttcaccctgtgacagttttgcacagctcatagagttcaattttcaaatgtcatcccactctgagagacccaatatttgaagtcgtggaaatctatctttaaaaatacttttaacagcattattcctaatattaaaacttggaaaacacgaaagggagatacttgagttgtsatcatagcaaatgttcctataatatttagtgtgtgtcactgatgctttacatattctaattcgtttcatcttcatgactaccctctgaggcagatgtactgttaaccccactttacacatggggatgctggggtctgagggcttgagaactccgcgggttaacccaagagttatgggacctggttatggaacctcagtgctaaggaaagtgacaccatcataggtagtgttagaacaaaatcttggggaatggttatgttttcctgttcggtggaaaggaagcatcaacatagaagattaggtaggagctcatgtacactaaaaatgaaagtagattagaatgagccgggttggaagtgggagaaatgtccccaaacacaggtttagagttggccttgagaacatcagcggtatggacagatgtacrgacactggggcctgataattcttccttatggcgctgtcctgtgccttgtaggatggttagcagtatycctggcctctccctccccagttcctctccctccccagttatgacaaccagaagtgtctctggacattgccarctgtccactgggaagtaaaatcactgccattcagaaccaccagcacagatgctaagatcatgggtggcatttttctttcctttttcttttctgtggtttccaactttccttgaataggcatagatcgcrtgaataagtaggagcaaaggagctctcgttgggatgaccatgccactctcctgttcagaaccttccagcaaattcccaatacacttagcttccccagggcctacaaggccctgtgtgagctggcccttggctacttcttggacatgttcttctctccctgtgaccctttctcatcatgttccaaccacacgattcttctttctgacattcagacacatccagctcatttccatcccagggcctttgcatgtgctgctctgtcctgttgctctttcctacctcctcttcacatcacttgctcatccacttcaggggtctgctcaaatatcacctcctccgagaggccttccctgatcaccctgtcatgaatatttaagcgcctcctgtttattgtaggtcacccctactagagcatcatctccagggggactgagacattgtttaatttgctgttccatgcctcactcctagaacaacgatcrgcacatagtaaaagttcaataaatatttgtggaagaagggaaacagacagggaggaaggaaggggggcaaataagaaaaataaaatcggtaaatttaggagcttacagtaaagaagcaatgtctcaacccacacagctgtgtttctctctaaattccaactcattttgacttgtggtttgtggacaaaagatttgcgtagcacgcagtctcctggcagctcgctctctttgagggaacacactaatacagtttttatgccacctctctccacaaataccatgccgatgagtggccagtgtcaaaacagcagcaacaacataaacagatgctccttcctttcagccgagcaagtgaagaaaccctgtgcgtcattcctcaaacaccaggagatgccaccgatagccacctctcctcacagtttcgttctgctcgagactgtgagttcatgtcaaycctgagctgcgtccccagggaaataggttctgctaayagtcagttcttactacgaggcattctcagagccaaggggaagctgggttggtggtctgcagctgaaaatctttggcagaaaatttactcraggtttttcatgtgtgtcatttgccttgattttgggagtagggaagaagcactatcagtatctttggccattcgtaaggtcaaaatggatgtcggcacgtcctgcaggccttttctcagcctgagttgatttcctggtgcttgatgggtgagcagaggaaggcaggttttcattctcttctctcttctttttcattcttttgctgcattattcatttccttccacactcgttcatgcagtcatttttttttttttttgagatggagtttcactcttgttgcccaggctggagtgyaatggcgcgatctcggctcaccgcagcctccgcctcctgggttcaagcaattcccctgcctcagcctgtagctgggattacaggcgtgagccaccaggcccaccgggcccagctgtcattatttatttaatgagcacctactgtgtgtcagccaggcctcacacctggcacttagagaatctgaataaatataaggaccacttttatactcaagaacaaaggccacctcaccagaaacctctacacactttggggttcaggtttcttgtgactttcttttccttttttggtttcatttttaattacaaaagtaattaacatgcttatcatagagcaataaaatgatgctgaagtatataaagtaaaaatagatcttttctgacataacccctgttaattgttgggtatatacccttgcagacatgttttaataaatataaaaatcatccacaaattcatagagttttctttttacaaaaagaggatcagattttacacaccacaatttgctagtctccactttcataatctcgacattttttcactgttagtacatctagatcttatctgctttgttactaatagtagttcatgttgcttatatgttacaatcttaatctttcctatgttgatcactgagtacaggcattggcaaactttttctgtaaagggccagatagtaaatatttatagctttgcaggccatgcaatctccatttcaactactcagttctgtcatcataacatgaaagcagccctagacaatatgtaagcaaagtgggtgtgtctgtgttccaataaaactttatttacaaaatcaggaagtgcaccagatttggccttcaggctataacttgccaacccctgacctttttgtcttccacatttttcttcatacttttgtgttcctaaacagatgtattcaggtttggtgtttagtttggtttargttttttgtgggagcaggtggcaggaagaatcactgattgttttttaaaaataatacattacacctgcttagcatctgattttttgcccatcagtgatattcatggaattgcttccaaagcaatgggtataacccctacttattgtttttaacagctgcataaaattccatcgaatggatagaggatctgtattggttaaggtaatgtcagctgctgtaacaaataaaccctatattctcagggcttaacacagtcacaatggatctctcacctaaggaccagtaacagtgttcctggtagatgggtgtcctccatgtggtcaaccaagggcccaggtcctttccattgcataggtctttctccctatagtgtctcagaggcaagtccaatcagcaggtagatgagaaaagagagggaagggtctggtatccaaggtcttaayggccagccctacacattgcacacatctcttctgctcatggtccattagccggaactcagtcactggctggacctaactgcaaggagactgagaaatgcagcgtagatctgtgttcaggaggaagaatatctggatttggtgggcacataagcatccctgcctgtattagtctgttctcacrctgctaataaagacatgcctgagactggataacttataaagaaaaagaggtttagtggactcacaggcctcagaatcatgaaaggcaaaaggcatgtcttacatggcagcaggcaaaagagagcatgtgcagggaaactctgctttataaaaccatcagatcttgtgagacttattcactatcacaagaacagcatgggaaaaacccaaccctatgatttaattacctcccactgggtccctcccatgatatggggtgggagagatttgggtggggacacagagccaaaccatatcactttctctaaaattaaatgacttacttgaggtaaagcagttacaacagggcctggtatgtaggaagcacwcaataaatgcacctctgctattgcaagcttgtattttttaagtattctatgatactgtcatgtccttgggacctctggtcagctctttacccctgcgggttactgtaccccttcctccttctttactgcttctaatagcctatcaatggcaagcctatcaattatacacacttgctaaaatttcactctaaaaactagtcaataccaggctgaataagatatcaggaagatgtcaggttcttatcackggaaactgtacatgtcaccttatgtggcaaaaatactttgcagatgggattcagttaaggatcttgagatgggggattatcttggattatccaggttggccccaaatgagatcacagttgttcttataggagagaggcagaaggagatttcacacacacacacacacacacacacacacacacacacacacacacacamgaagacartgtgaagacaggacagagatttgaagatgktggccttgaagcttggagtgatgcagccacaaaycaaggtttgctggtggacaccagaggctgaaatggattctcacctggagcctctggatggaatatggccctgtagacacctggattgtggcccagcaatactgagtttggacttctgtccttcagaactgcaagaggataaatttctgttgtaagccaccaagtttgtgcttctttcttacagcagccacaagaaatgcatccactgagggttctagggctctcttgtgaataaaatgtataagcttctcaacttgcaatttgtcccaaactacattccctgctctccctaccaactgccttcccagtggtcatgagctctaycatccactcagagttcactctgaaagcctggaagacttgctggcctcttcccaatccctcccctgctgtatcaaagttgatcgctaagacttatcaccatggctccraaatagctcttgatccactggaacactttattctcaccatcacaccctcgcttgcagtgatggcattttttgcttaagctagaactcgagtctggtaaatgggttcagctgcgcctgtgtctccctctctgcctcctgccacgctgctgcctggggacagttttccaaagttgttcctgtgcccagcattccccacaggctctcctgctcctttgagagagaatctaaactttaaccaaaccttgaaaatgccctcatttctcgccaactgagccatgatggggatgacttaggcagggagacaaaatgagcctggttgcaataaagtttggtgattttttaaatgaatctgagctcacgtgtaattatgaaaaaaaaacatgaacatgttatatagtttttcactgatggctggtatgaagatagtagcattatggaaatgagagacaacttgtccatgaggaaccctcatttttttaaactgttaagttcaggggtacgtgtgcaggttcgttctataggcaaacttgcgtcatggaggtttgtagtacagattatttcgttacccataaagtacccgttagttatttttcctgagcctctcccacctcccaccaccaccctccaataggctccagtgtctgctgtccccctctgtgtgtccatgtattctcatcacttagctcgcacctattaagtgagaacatgcagtacttggttttctgttcccgtgatagtttgctaagggtaatggcctcaagctccatccatgtccctgcaaaggacgtgatctcgttctttattatggttgcatagtattccatggtggatacgtaccacattttctttatccagtatatcattgatgggcatttaggttgattctgtgtctttgctatggtgaatagtgttgcagtgaacatacacgtgtatgtgcctttataataggatgatttccattcctttgggtatatacccagtaatgggattgtgagtcaaatgttatttctgtctttaggactttgaggaatcgccacactgtctgaggaamcttcatttgttggraaccacccaacacagagtagatgctcaggaaataaatatgcagtggatgagtaatatgtgcagaatgacctgactgagtcacaaagacctttctggttgcatttgcatctgtcattgtgtacatagagcccttccccttagttcagagtctctccccttggcactgtggagatttgggactggaccattcctttgttgggggtgggggctgatgctgtgcattgtagcattagtttagcagtatccctggcctctaccctctggaattgtgacaatcaaaaaggtttccagacattgccaagtgttctctgtggcaggggtgtggagtgaagggcagaatctcctctgttactgctttagctgatcgcagtgaggccctgtccctttgcagaactttattccattcccgcctcccacggcatcctcctcagcttcctcctgcatcactctgcygttggcatccccccaacacatacgcacacaaacgtgcacacatgcacgcacacgcacgcacacgcacgcacgtactttccttcaattgctccccatctggcttatgaaastgacagagaataaagcttctctcttaccctctcccaacccccaygtcgttgtcctgcacctggctggccatccagggctcatctcttttctctgaaattctccaagcatccctgtcattgtcctgcacctggccggccagccagggctcatctyttctctctgaaactctccaagtagccactgaagtcagcaggaactcccaaagcagagacatgccgtggggggaatatgggaatctgtcgcctgatttttcatggccttctgaaatcacgagaaggggttgcatggaaacggttgaaagaaaatgattttttaagtgcccctctggccacactggccagattcaggctaggtctggcagccagagctcagggcaccacgtcatgcctgaattttgttttatttttctatccattattcgaaggaatcatgctgactttggctattaagtgagcacttactatgcaccaacaaagcactcggcatgtattcactcatttcacgccactgcaacctaggagatggacacggacactattattatccccattttacagtggaggaaatgaaggcttagagagacactttacccacgggacacatctagtaggaggagcagccaggatttgatctcaggactgtctgatgccagatagtaataataaaaacagctaagtttactgatgtatttactgagtgccgggtgctgcctggggggctttacatgaattgatttacttaatcatcccagcagcgctatggactagaaacctttgtgattcccattggtggatgaggaaaccgaggcacagcaaggttctatgacttgcccaaggtcgtgtggctgggctcccgtcgtccagctcttaaaccctctgctctagtgcaggggaggaggcaaaccatgtctmawaggccaaatccaatccactgcctatttttgtaaataaagtcttattagaacacagtcatcccattcatttatatgcagctgctttcacagttcaatcgcaaagttcggtagttcagcagagacagcgtgacccacaaagcctgaaatcttcaccgtctggccgtttacagtaaatcttttcaacccctgccctaggaccttccctaactaccatcctgccatccaagctgtggggccccttccctgctggagcagcagcacatcaaagaacgtaaacgagtgggcatttctgcagcccccagaaagcaagcyggcatcccaggaggtgcctgggaggctctctgagaaggctgactccccacctccaccatgtttcctggaggtttggctgataattaggccagtcctattatcaaaaagaccaaaataaggccgagcacagtggctcatgcctgtaatcccagcactctgggaggccgaggcaggcgggtcacctgaagttaggaattcgagaccagcctgcccaacacagtgaaaccccgtctctactaaaaatacaaaaattagccgggcgtggtggtgcgtgccagctatttgggagactgaggtaggagaatcacttaaacccaggagacggaggttacagtgagccaagatcatgccactgcactccagcctgggcaacagagcgagactctgtctcaaataaataaataaataaatttattttaaaaaatagaaataaaataacaaatgctggcaaggatgctgagaaaggggaactcttacaccctgttggtgggaatgtaaattagcactattgtggaaaacaatgtggaggtttctcaagaaaactaaaaatatagctaccatatgatccagcgatcccactactgggtattatccaaaggaaaggaaatcaatgttgaggacatatctgcactctcatgttcattgcaacgctattcacaatagcccagatatggaatcaacctaagtgtccatcagcaatgaatggaaaaagaaaatgtggtagrtacatatacacaatggagtactattcagccataaaaaggaacaaatcctgccattctcagcaacatgaatgagcttgagggacattgtgttaagtaaaataagcgaggarcagaaagataaataccacatgttctcactcgtagttggaagctaaaaaagttaatctcatggaagcagaaagcagactggtggttactagaggctgagaatggtgcaggggtgaaccagaggctgcttaacagatatgaaattacagcaagagaggaggaataagttccagtgatctataccataataggatgactacaactaacaacaattgactatgtattttcaaatagctagaaaagcagattttctttctttctttcttttctttttctttttaagacaggatctcactgtttgtccagtctggagtgcagtagcacgatcaaggctcaccacagcctcaacctcctgggcttaagtgatcctcccacctcagcctcctgagtagctgggactataggcacatgccaccacacctggctaattttttatttttgtagagatggggtcttgctatgttgcccaggctggtcttgaactcttggtctcaagcgatcctcctttctctgcctcccaaagttttggaattacaggcatgagcgaccgtgcccagtcagagcagattttgaatgtccccaacrtaaagaaatgataaatgtttgaggtgataggtatgctaattaccccaatacattgtatacctgtatcaaaatatcacactgtaccctataaatatatacaattattatgtgtcaattaaaagttttttttttwaagattgggccattcyacataggcccaggtgcctgcctcagccctggagaaagagaggggcataaagaaatctaagttgctttctcctcagtctacttaatccctgacaaaacctggtacatcttccacagtgagatcatatgtcgcctcttccatgaagccttccctgattccttcaggcagagtgggtgaggatttcctctgggctcctcattgccttgactaccttgtcgcatcctaccacgtaacrgcaaagtctgattttccctttacatgcctgaagcagacactctcagggccttgcccacatccccactcttactgcttcagtgcacagctggactgtgggtttctagctgccaacacctgtgtacctttacccatgggccttctctcaccaccagagagcctgctttgcctgcctgcrtggcaagtccaaagcaccagagtgaatgcctctgttccctggcaccagccttcagccagtgcctcacaggagtgggtgtataaataccactgctccctcgctctacccctccaccccgtgggatgacggcragtggcgttttctacactgactcgcacagtgcctcagcaggactaagccccagttgcccatggtggtaacttgcttgatgacacaccctgtatcggctccttctgtttctcttatcrcatccccagtcccctactggtgtttctcaggatcatctcccaaataaactgcttgccctggaatccttgtctcagtgtctgctcctagggagccctcatcaagtcagcatcctctcttatccctcctgcaggcaaaagctgggtctgtctctgaacccaccacagggcctgctgtagagcagatgctcacatcagtcagtcgtcaaaaaagaaatgtactgagtagctgctgtgtgccaggcaccgtgccaagccctggggacacagcagcagacagaaccgacaaggtccctgccctggtgagctgagattctaggacaatcaaacacaaataaatacatgagctaactttagatggtctcagtgctctggaggaaataaaacagggtcatgtgcaagacctaggggtcttccatactcactggggattgtttttaatgacaatgtccaggccttatccccagaaatgtctgattcatttggtctgaagtggagcctgagcattgatatttaacaaaaaaaacacctcccaaggtggttctgatgtgcaaagaacacctgaaggtgggccgggggtggtggtgaggacaggcagctggcctccctgaggaggtagccttcggctaagccaggcgaacaagcaggaaaagtgctctaggcagaagcagctgcacatgcgaagtcccagtggcaagaggtactatggtgcaggatgttcagcatgatgggaacacgggctgccaggaggagacagagagagatgaggcccacaggcttcgggtccttggtcttagagctcttgagccattgtggctcagactgcagatcttaacacatcagcgggttatgaaatcaatttggtgagccacagccagcatcgcaggaagaaaagtaatagaatcgaaaataccagagtgtgttgcacatgaggtcagtgtggttttttgaaacttttatttgaagttttataaaggtgtacactgcactgcattgcaaaacagrtttcttactgtgagtcttggttgaagaattcgaaagccacygtttttagtccctgtgaaagtttggaatttagcccaaggggcagtggggagcaattaaagaggttttagtggggggcatgacaaggtcagatgtatgtttaaaaatctcactccaggagtgtggagaacagatttggaggaggtgggcagtggaggctgggaggcgtcttggcaggctgttggaggcagtcactggggtgtgacaaagagaaccaagtagcacctggcacacagaggtccgcaggtggctgttgaagggatgcacgtgtctgcaacatgggaggatcctgggaggttgaaaggcaacatttcaagctttgcctccaacccctccctgggatgaccacctacttgtcacctgtcctgtracgcaggtatcccaggcatggcagataatagactctgattttaacacttcctgtttgccagacactctgctaaatgctttcaaaactcatgtaatgccctcagaacaaccccattggtaagtactgttaggattcccgtttcacagatgaggaaactgagaccragaaaggatgttacttgcccaaggtcacagcgatcatcaagctgtgtagctggcactccagccgggcagtgcggctctagagtctgtgtgccccagcatctgctgcagtcatgtgggagccaagctgcttgggtttgaatttaggggataatacactgagtactctsgtgaggatttagtaagggacggtcagtgagtaatacattcagggcagtaagggcctggagcttaggacgtgctagataaatgagagtgagttgtgccactagacgcccaacttgtagagttggattcaaattcacgtaacttgtgaacagacggtggaactgccagggttcgaatccgcctctgacacttaactgcctgcatcgcaggagtgtggtaccagcgctggctcttgtaattaggtgctctatgtccagtacttagaactgagcccgaccttggtgaaccctaagcatgagccattgatcccactgctcaaggtcatacaggaatacaagggccaaggctggagttcaaacccacagccagcttgctactgagcaactacagcccagtgtaaaaagggctttaaacagtcaagttaggtttttctctggctcttcgaatccttaatcccttctctccatgtctgcccaccagcagtgttcccaagttagagcttccagcccaggcaggccgccagagtcaccaggcaccccagggcacagagacccatccacagccttgggcaaaggtggggggttggagggaagcctctgagagagctggaaggtcccagccccgcagtggccaccaggtgccagggcctgggcctcacgcctcatagctcctgagtctgacctaagcgtgccttcttcccagcgtgcagaactgtttgcctgggcgtaggttggagacaggtgaccccacctggtkggttcaggcccacgcttgttcagcctcctagacgctctgagtcttggcctcctgactcctctggggttggcgcagccttgcttgccttggctcccgtccrccgggctgttccctgcacgtacgagtggccctttagaatgtgtttgtctggtcaaggttgacaaacttcctgagcccacgtctgttgacttttgtgggaccttctggctacctggctgycgcggatgcttcgctcaagccctgtcttctctcttggggtgtggagtcagctaagagggcagcagagctggctgtgttcacggaatccagtgtctggagagaaagctggtgcccatggcggctgggactggcaagtgaaaacttgaaattccatgaatgtagcacctggtgattctttggagaactttaaaatgcarcatgagtataaactgttcttaacaaccaggatatgaacraggcaacctcttacagtctttttttctttttcttttttgggatgggatatccctctgttactcaggctggagtgcagtggtggcatcatagccttgagctcctgggttcacgtgatcctgccgcctccrcatcccaaagtgctgggattacagggatgagccactgtgcccagcataccgttcattcatttgttaattcagcaaaatactattcatcacatattctgtggcaggtgctgttctaagcacagggatagagcaggaacaatctagctacagcctctgttctcatggagcatgttaaggtctccagcaacactgtccgagaaaaatataacatgctttaccagtgtgagccacatatgtaactgcaaattttctagtagccttgttaaaaaaaatatgtaaaacagcaggcctggcgcggtggctcacacctgtaatcccagtactttgggaggccgaggtgggcggatcacgaggtcaggacatcgagaccgtcctggctaacacggtgaaaccctgtctctactcaaaatacaaaaaaaattagccgggcatggtggtgggtgcctgtagtcccagctacttaggaggctgaggcaggagaatggtgtcaacctgggaggcggaccttgcagtgagtcggtatcatattgtgccactgcactccagcctgggcgacagagcgagactccatctcaaaaaaaaaaacttgtgaaacagtacattttatttaactcaagatgtcaaaaaatattatcatttcaatacatcatccatacttttaagattactaatgcattattttactttttttgtatcaagtctttgagatctggtgtgtgtttggacacatctcaatttgttttttgtttgtttgtgtttgtttttgttttggggacagagtcttactctgtcacccatgctggagtgcagtgacgaaatctcagctcactgcaacgtccacctcccaaggttcaagcgattctcgtgcctcagacacccaagtagctgggactacaggcacacaccaccacatccagctaatttttgttttgttttgtttttagttgagatggggtttcaccatgttggtcaggctggtctcgaactgctgacctcaagtgatcygcccacctcggcctcccgaagtgttgggattacaagctggagccactgcacctggcccacatctcaatttaaactagccacatttcaagtcacctgtggctcatggctactgattagagtctaaagagagagataagcattatacaattaaatactcagctgttaattccaatggtagtaaatgtcatgattgacaagttcagagtgcagtggaaattaatccagtcagggaggatggtgatagcagtaatggtatcagggaaggcttcctrgaagcagtgactttgtgatttttatgcagaaacctaaagtggggtgaaggggaaggatgagcattcaggacagagggaacagctgtgagcagaccccaaggtgccaaggagcttgctgcttttaagggataccaggtaaaatgctggtatcaccagagagttgagtaggaagggatgcaacaggagaggttagcaggagccaggccatgtgaagcagctcacatggctcctggtgcacagcagtgctgcactcacaatgacaattggcacttggagagacagctgctgcttgcagttacatcacagatcgggatgattggcttgaccttgtgtattggaggcctccaggacaacccctggtggtggcatagacagcagccatcatccctccttgcaggccaacagaagctcgatcttatctggctgaccatgggctctgcccaaggagatgaagggtggttagaccaagccccttgtgattggtctggatgagatatgggggatggctgctggaggatgctgatggagatattcctctgagataaaatgaaggcgccacatgaatggagcctcttttcccactttcttccttcctgcttagagtagggccatgtccagttgtgtttcttagaaatgtggcttctgatgtcctgtgaccctagggggaggacaagagacaggcgaaggtgcccatctagggccctgatcttgttaacccacctgaaccgccatcaccagacatcttagcaattgtgatcattcatatctgcaccttttactgtaacatgcattgtgtgggatgaacccaagaatggcaaacatttacctggcacttactgtgctccaggtgttcctcaaagccctttgtctcacgtcatcctcacagcaactctctgaggttggcgcctttcttatccccattgtacagatgagcagggactcacgcccaagggttgcggctgtatcttttaaccgtcaccctatactgccccctccgtgtttaaacatgttggtttggaaagctcattcccctccccttcaccaccccccagaacatcattcctctaaaacaggtttctcatgctcagcacttttgacattttgggttggatgattgttgtggagctgtcctgtgtgttacgggattttagtagcattcctgacttctacccaccggatgccaatagcaccctccccattggtgataaccaaaaatatatccagacattgccaggtgtcctctgggcagcaaaatcccaccccgccgcgccccccaccgaccccactaagaacctctacgctaaaagatgttttcctgccagtcacctgggtcgctctgtgtccttgttcaggttaacgtttctgaacctctctttcctcttctgtaaaaygaggggacagtattacgtatctcatgggttattttaaggattaaatcarccagtgtatggaaagcagctaacagtgctgagtgcataatgagcacttgctcggtgtgatgatttgacctacacggctctttcttgtctgttttcagctaacaggaactgctagctgggattttttttaccagcaaaagagaattccttgatccaaggtgaaatctaccagggtgttagctctgggagtcagaggctccatctgtcttcctccgctactggattgccaggaatttttttttgttttttgtgttttgtttttggttttttktttgtttgtttgtttktttgacacttagtcacccagactggagtgcagtgatgcaatcttggctcactgcaacctccgcctcctgggctcaagccatcctcctgcctcagcctcccaaagtgctgggattacaggcatgagccaycgtgcccggccgattgccaggaattaaatcagtgctggcacatagtaggttctctgtagtatttgttgactgaataagtgacttaaatccctttgattagctatataacttttttatagatttctcttgtttctttcattcttccctgccttcctctgtctttgtttctcctcttttgtttttgtttgtttacttatgtgtcttgttgttgttgttttttatttgtttttactatggctttggtttcactacccaagaaatcccagacttcagcactggaagctaaagctgaactaagctaactcaggagcctcaaatctattttaggagttaattcccttggcttggttcagccccacaatgcactctttgggggttcatttaatttttcttagcaggttctggctggatgttaaacctgggcaagggaatgtgcttcaggctgttgagtttaggctttacttagaatctgaagtccctccaccatttgtgtacaaacatcattataatataatttactattaaatgtaagggggtgaaggggcatgcagaggtcacacatgttccctgaaacataatcctataattaaaagtgtgctagaccataaaacttacgatgttcccatctctaaggctacttttataaaatgcatctcatgttcttccgtcggatcttctgacctgaggcataatattaaaacatagatcaactcaaagggtctttgatttatatggtacatttgcagacaccgactgcagttcttggtgaagagtcagttctcagattgccatagttaagcgcgactgaagcgcggtgaaagtacttcctaaaatccagagcgaatgtgaattcatctttttctcaaatagccaccattttgaaaatttctctgtttccatttcactactgtcctctgctatagaaattagggttttctgcttgtttaagtgtatataaaaatagaggagaggttctcaaccagggttgatgttgaccccaggggacattttgcaatgtttggagacatttttagttgttacaactcggggagagggcagctactggtaactggtgaggacaggggccagagatgctgctaaacagcctgcaattccctgtacaacaaagaatcacccagcccaaaaacctcaatagtgccaaggctgagaatttctgagatagagagacgttcgtttcatcattgattaaaatagggtaaaaaaacccaaactgtgaataacctggatgtacattggtggggggatggttaaataataaactctgctacattatttcagtggaatactatgcagacrttgaagaagaagcaggcggctccatgtgtactgatgtcgaaaactgtccaggatgtatttttaaatggaaataaaaacaaacacaacagagtttttgttaaaccattatgtttttggtgatattaaggaattttgtgccttaatgttaaggaatattgtggctatgttttcaaaaaaagggtctttttttagagagagacttacacggaaatattgacaaatgaaatgatattatggggtttgcttcaaaatactatgacagggggaaatagatggagtggaaatggggcaggactggccatgagtgctggggctgtgtgatgagtttaggaaagctcattagatgagtctgagtatttttgcagtgtttttgaaattctccataaagttgctacacacacacacacacacacacacacacatgcacacacacgtaaatgcactgaagaagatctggtgggagataagagatggtgagtagatagaaaaatacagacagatgtagatttggctctgtgtaacaaagagcttaaataacagtggcataaataacctaggartttatttctctctcatctaagagtctgagcagcagctctgctctgcaaagtcatcagcagcccagattcctttcaacttgtttcctcatccttaaggtgctgctcttttcctcattgtccaagatggcactccatcacatgacgttctatccaataggaatgggaaaaagaggaaggtccaccccattcctttaaggacctaacctacatgttacttgcatcacttttgattccaccctagtgactgcgcttagtcacatgaccacagcctaactgcaagggaacctgggaaatgtagtctttattctgggtagctgagtgccctgctaagaatcagttgtttgtagaagagagaagagaaagaatactggggatcacctaacaatctctaccacrgtgtactcaaactgtgaatgataattagyacagatcagtgggactatggggaacttatcttttcacattatatgttgctctgactgttttaccattagcatgtgtattttctcttttgtaaagagaattaaatataaaaaatgttctgataagtggtgcatgcatgatccttgtatgtaacactgtgaggctgtagtgtcatttttcaatattcatttcgctggtactcattgcctgactgtttagtgctgattacaattactttattagatgctaaggacacaggagtgacaagacagacaaagcccccagcctctgacagtgaacagagaaatacgcagtatattttaagatagtgatcagaattaagaaggcaaataaaacacaatcatgggataggaagcagggggtgattagggggatgtaggaagagtttaacaatatgatcaagaaaggaatctctgaggaggtgacgtttgagaaaacaccacaggtggaagaggatttgttgcagaaggaacagcaagtgcaaaacctataaagtgggaaccaacacactaggtttaaataacagcaaaaaggataatgtccctgcaggagaagctataagaacagaacttccagaaggtgcgattagagggtgggaagggttttggattaagtgttatattaggtcatttgggtattaattactccaagtcattatgaccaaaaggtagttttcctaattatttgcaatcattttcaaaataattaggaaacatggaatgtggaaaaacactccattggcacagtgtcatgtggtgaaatgagatctgcaccttgttccggctctgcctgtcattagctgtgggacctgaggaaacttacttgatttcttggcctcccagtttcttcacttttaaggatggagaagagcacttactctgtatcctattctgctctcagaactacacaagtagtaagtcattttatccccacagcagccccaggaggtggggaccctttttatccccacctggcaagtgagaaagttgaagcagagaagtcaaggaagatcccacaccattagcaagtggcagagccaggatttgaactcaggcacctgggcacctgaggtagctgcttagtcaccactgtaccaggttcctgccggctctgcctacctcacagtctggttgggagtgtgcaatgaggaaagaattttgacagcaactttcaagaatgtcaatgctgaacaaatgtattaacattattggaatattctggaatatctctcttctttccaaataaatattttaaagtttctaaactcctaatgaaagaattgattcaggccacaaacattagtggatgaaaccatcagatcggaggttaatggggaactttataatggaggaagcaggyggtgctacctgaacacaagggccctcgtggtgtcactaggagggacacacctgggactcctgatgagatgcaatggtgagagcccagcacaaattccagagcattgctgccctcccccaaattactctgaacctaatcacatttcaagctaatttatgggaaatacaatgaaaagagaaatgcattaacaacaccgtgaacaggcagacagacaaatacagaacgtgagatattctacaacacaactaacctagtttctccaacacatcaagagtctgtataaaaaggagggggaggctattctagattaaataaatgtaggcgatacaataagcaaatctactgtgcagacttcgtttagattccgtatcttacaatccacccttacaaaggcatgttgagacaattggggaagattgaatgtggactgtgttcacgatgrcacaaggagtgagtgtgaattttgttagatgtgataatagaaaatctccatagttttaaatgargtgtggtggagagaagagacttcaagtttgaatttgttttaaacacttcagcaaagagaaaagtaaacaaaccaaaattctgagaagagacacatttggaaaaacygtgaacattgttgagtctaagtaatgggtgcacagaagttcattccactattctgtctgcttttgtatatgttggaaatttttcattaaaaaaacttctagccccactatgaagccatctgaccaaaagagaaggaggaaaaaaaaaaaaccctcatcgtatgaaattgcataaaattcagccaacctcaaaacaagaataaaaacatttttaaaaaaactcatgaatcgctgcatggctctttcaatttcggggtaatgatgtaattagaggagctcagtcattagaaaagattaattttaagacatctgctgctgtcagtggcagatggcagaagagtggaacattgaaagcacggggctctcaatccatctctgctacttaccgttgattttaggcaaatgtcttcaatttctgtcctcactttccttatcagtaaaatgggattaaagttctataggggctattgggaagattaaggggactcaaatatgaaaggcacttaaaacaatgtctggctcatagacagtgcttagtctacgtgaactactattattttcactttcatggtggtcagagcttcatgggggcacaaataatttggaccaagtgaagatattctcatatttggtttccaatattcagtttctcttacccattttccaacatttctctcctgcctgtttctcttcccccagtaaaaatgcccttgctctgtagactcagaacaaagctcaccacagttttagtggtctcacttgggtccaggtcattgcaatgggctatggttgggatgaaggaaaggaagaggtaaacagtgaagggtaatgttgctggtgtggtatctgaaagcaaaatgcctctgcaacctgaggattctctttcctccctggatctcttgcctgcctcttggtaggataccaggactccaggattccaggactcccccagtggcctcaagcacttcgtgttgtccagccatccttggcaggaaggactcttcccttacaggaagagtccttggtgttttgctttgtgccttgttttggtggttgtgggttggggtgtgggtttggtttggcttttctttttttctttttaatggctctgcatgagacatattttataaagttctacattttgctccagggccctgctgaacccaaccaggaatcaagcagaacatgtgtggtcctgtccgagtctgtcactgcacgttgggtgcctttttgaaggttgccttttgtgggcctagagaatattggaacacgcatcgtaaaatgcagacatctgaacttgcatcatgtgtttttctaaaaagctgatctcaagaggttgcatactgcgtgattccatttatataacattttcaaaatgacattttagagatggagaacaggttagtggttgccaggagttaagggttttgggtcgggtgggtctggggtgggtgtgcctatgaaggagcagcacagggaratctttgtggtgatggaatcgttctctagattgccgtggtggttacgcagagctgcaygtgtgataaaatgacacagagctacacacacactgcaccaacctcagtttcctggctttgacattgtactatggttatgtaagatgtaatcacagggtggaagacattgggtgaagggtactcaggacctttctgtactatgttttgcaactttttgtgaatctaaaactatctcaaaataaaaagttttggccgggcacagtggcttatgcctataatcccagcactttgggaggccaaagcaggaggattgctggagcccaggagttcaggaccagcctgggcaacacagtgaaatccagtctcttaaaaaataaaatacataaaatcaaataaaatgaaaaaagtttttaaaaataccagggacagcaaaattgggttgattgaccaaatgatgggcccttgttttacatgcgatcaagaatgagggaaacaggctgggcaaggtggctcatgcctgtaatcctagcactttgggaggctgaggcgggtggatcacctgaggtcaggtgttcgagactagcctggccaacatggcaaaaccccatctctactgaaaatacaaaaattagccgggcgtggttctgtgcacctgtaatcccagctactcgggaggctgagtcaggagaatcacttgaacccaggaggaagtagagtaaaagctttcccaccagctgtttttattttttattgtatgccaagctcatatgaatgagaattcatcaagcatagttgagagaatttagtctggaattgagattcaagactcaagctggtttccttttgtcataggactccctaggactcagtccgcttggctgaaggatggtgctctgaataggctgctggggaggcatattgcttatgcaattgcttatgtaagctgagtgcrgcggctcatgcctgtagtccctgcacctcgggaggccgaagtaggaggatcacttgaacccaggagttggagaccagcctgggcaacaaagtgagatgcctgtctccacaaaaaaataaaaatgaaaacactaggcaggtgtgatggtgcacacctgtagccctagctactcaggaggccgaggtgggaggattgcttgagcccaggaggtggacaccaggattttgctaggcaacacaacaaggccctgtmtctataaaaatagaataactgtttatgtcttcctaagagagtttttgggttttgtttgtgtgtttatttgttttgttttgtttgaaatggagtctcactctgtcacccaggctagagtgcagtggtgcgatctaggctcactgcaaactccgcctcccgggttcacgccattctcctgcctcagcctcccgagtagctgggactacaggtgcccgccaccacgcctggctaattttttatatttttagtagagacggggtttcaccgtgttagccaggatggtctcgatctcatgacctcgtgatccacccaccgtggcctcccaaagtgttgggattacaggcgtgagccaccatgcccggaccctaagagagtttttggataaagctttccaatcagggagtaaaaacagcacaagggatgaagacatgggacattccgtggggaatatagattggactcaccgctctgaggagcgacatgcaaacgggtttttcagttttaaactggggggcccagcagtttttccttggggtatcacttctagagaactccaggcacgtgcacccaagaagacctgctccagtcattgtggaattcgttctcataacaacaacatggaacccctgaggactggacaggtgaactgtggaatagacatacctgcagataccatgcagcagtgagaaagaataaactagatttctgtgtcatggcatggaatgaacaccaaggtattttattattagagtgaaaaaacatcctggaacaagatgtacaagatcaatagcgataacaacacattcacaaaacacatttgtaaaaacagtactgtatattttaatgaaggtgtgtgggtgtttgtgtttataagctatttatcctattaattgtggatacatctggtaggaggtagtgccccaatgtggctgtaatcttatctgaaattttaaaatgtatttacaaatatttttagatgttatttgggtaaccaaaattctattttaaaagaaaaagggccatgcagttcttatctcagcaggaggaggcacaggtggactagttggggtcacctgttgaggaattcctactaagtctggatagcaaatcccactctgaaatgccaacttcaggagagcaggaacttgtctgtctggttggacactgtatcctcaatgtctgagacagtccctggttctttgaaggcccttaaaggacaggggaaggggaggaaagatgaaatcaattagtgaaggagtagcagctttgctctttggtgtgctatgtaaacagcatcggtgattctaaatgatgggcagcctgactcaatgaatgaatcagtgaatggctttagtgtcagctgtgttcctgatccatttatctgccttctagcctttgcaaaggaaactgaatttgccttatttatctggggagatgattcccaacacattgcagccctgccccacaacttctattcaatgacacttccccatgttaagggagacagggtaggggaggatggaggtgtggacaggaggagggatttgtgatcacttccttgtggcttgtggagttcttccccaaagttgttgaagtgacaacagcacctgaatttcactggctggacccacagctgattcctactctaatttttcacactgaacacctggggcgtgatatacctgtatcaaaacaaaaggcagtctgcagtcccgcaggcaagggtctgcccacggctccaggtaggcatcttccagggcttgtgtgcagcaggagagaacgtctcttctccagcagttcatcttgggcctcccgttggycccaggtggctcacgtgaccaccaccctggagccaatcactgtagaccgaggaatgggagatgctaattgccagsctcagagcttgttagtagggtcagtcccagccaagccacrtggactgagagtcatggggagacctagggaaattaaataactcacaaacacctgtaaaaactgttacagtgactggtgtgtgtgatagagggccatgggcctgtgaaagctgcaggagggaaatcgcttactcagggagagcctggggaaatcctgccggaactgaggcctctgcagggtgagcaggagggactggagttccaggcagagggaacagcatgtacaaaggccctgtggcaagagggagtgtggagcgagagaaaggccagcgtgctggaatcagatattggacaaggagaagccagatcaaggctgtgttcggaactctttgctttatcttaagagcaatggaaagccgtcagaggttataagcaaggatgaggtgaggcgggcaggttcagatttatgctgtcatttgctgcacagagaacaaactggagggaggccccggtggccccagggaggtgggcaggggggctgccgtggtcttcctgggcagagaggatggtggcttggacctgggcgatggccatggaggtgaactttataaggcctggagatggattggacgtgagcattgaaggagagggagaagtaagagcaatcctgagcttttggtttgagcaactgcccccgaaatgggggaagccaagatggtttgtgattcacagatgtattttgaatggaaattgaatgaggctggtggaggctgtcagagacgtccaggtttgggccacagctgctgtctgtccagaagcctgtgattgaagtcagcaggctttgatttctcagcccgtgaaggatgctgggagtgaccctctccaaagtccccttagccgactggccatctgtcctctgcatctracagacagggccaccatcctcagccaaggtagctggtgtactcacgggggtgtggaaaggtgagcggcccacccgcctgggaccctccatctgcttttgatmcctcccagcctttgaagctgcccctgcccccaccctccagctgtcatctctcgggctcccccacttcttcccagtccccagggacaggggtggtgacaagggtaacaaatggcacaagccgcaggcagcagcaggccaagggggccagagggagggtgttcctgaatgcctctttcttcccgctccttcaggctgtcttctgaagtagccaggctatcagggttttgcaacaatgcaacaaagaaagaattttttttttttgtaaatgaattccatgcttttccttcctttcccttccctgccttcgtgaaagggaagctaagtctttctcctaccccagattccttgaaggctgtctgagttctctcttccttcccctgcatagagaataagctggtctccaatttcaggtaattgtgaggtggggaagagtggggagaatgtgaaggaagccttccccaccaaagtgcggcagagctcaactctgcccctcaaaccacaataggaaccagtggtttccgggtgatcctgatgacagtttccagtgtctacctggaatgaaacgaatggtgtgtttcaagcctttgtctgtgtgcatgcaaataatctcagctgccctttgttgaatacccactcactcgtgccttctctgactcatttttctcagaataacctggcggggagggtattattttctccatcttrtagaactgaggctcagataagtgaaataacttgcccaaggttacacygctgataacgacatagctgggatttgaacccctggagcagataacacgtctggtgctctgactgggtagcttagtagactttagagctrgatgggccctgagttgaaattgtgatccagagctatttgcaagctgtggttaagagcacagatctggagccagatcacctggttgagaatcctgactctaccactgactagccaggtcagtctctgaacctgtctccttatctctacctacttcataggatgaaacgagccagtgcatgcagagagatttaagcctcagcgtaaatgctctgtaactgtgagctgtttttatttctagtatctgtaaactaagcaatataattagggccaggttaagacctttagcagcctcaaacaccagagactggcctctctcctccattgtctcctccaatacaataataaaacggtgtggttcgtaagacaaaaaactcgctgtgctgaaattttttttacaattttgtttagttttgttttttattgatacataatagatggacatattttcagggtgcatgtgactgtttgatacgttcatataatgtatacagatcaaatcagcataattgggatttcatccccttaaatatgtatcttttctttatgttagcatcattcaaattactctatactctggctattttgaatgtgtgataaactattgttaattatagtcaccgtactgttctattgaacactagctcttattccttctaactgtatatttgtacccattaatcaacctctcttcatcctccccaccacccttcctggccttcagtaatcacagtctactctctatcttcatgagatctacttttttagctcccacatgtgattgagaacatgccatatttgtctttctgtccttggcttatttcacttaacataaygacctccagttccatccatgttgctgcaaatgacaggatttcattgttttttatggctgaataatattctagtgtatatgcataccacattttctttatccatccatcaattggtggagtgcgctgacatttgaaaagcttctttttagatcctcatggcagaacaggataagttcaccaaacaggaatgatttcacgttttcttggtgtctagactttgctcagacttaaatctgtgtttagtcggcctttgaggaaatacaggacagatccttctatctcccagcgtggttgagagaattaaaagagatcatgtaaatgtgatcaggaaaattgcctggtgtataataggtgcttgggaaatgagaaccatgactagaatttttggaagggttttactaactctggaaactgagttgccttgagttgcttgttcacattcctatactctgtggctaatagtttgcttctgcaagtcaccagtgcctgtagctgtagctgacagcaggaaagaacaattgtcaggttctcaagtcagggtcatgtttactttgtgaagattaatatttctgtagctttggctttattagtgctgttcatttatttgcctccaaaggatggtgtgttttgattgctataggtattttaattgctataggtattttagattttgcagatctaattctaggtctaacagagccctagaatcagtcaagtccctttcttcatgcacattaattttggaaaaaataaacttttaaattatcatatattggtggattattttatcattattgtatgtccctgtaaatctctaataatggtttttattttaaaatctatttggggtattgtgttgtattcatattattgaatccttgctttgaatcttggtatgtctttatatttaaaaggggtctcttgtaataagcatgtagttaggtttttaaagtcagtctggtgatctttgtctttcaagtgttgtatttattctgtttgcatttactgtaactaatgtaatawaaacatacatgaaatgtttacatttattattattctttaagtggttatcctaaatattataggatacattcttgatatatctaaaagtttactataaattagtacttttaccatttccaagaaaatgcaaggtccttaaaacatgttaattgtatttatctatcctcctgctcacatatttacccttttatgttgttctttatctttgctgaattttcgtgtttccagaatattcttttttagtgcaggtttactgatgggaaacaatcttaattttggtttgtttcattttgattttgtcttcattttgaagtatttttttgctggcatagaattccacagtggcagatgaaattccattgttttstggtttccatcaattctgctgagaagctgcttctcagtcttattataccttctttaaagattgtcttttattccccctctgactgcttttaagattaatttgtgcacatgtgcagtttaaccatcacatacccaggaatgcttttctctgtatttatctttgggattcacagaacttcttgattccatgacttgatatctgtcatccatctggcaaggtcttctgtcagtttctctttaaatattgtttctgacttgctstctctctcctctccttctgtggctcctattacatgtgtgctagatcttttaccatgtaccatgtttcttttatgctcttttaaacctgtttttcaaccttattcctgagatctgtttactgacttaccttccagtttgctaattctttcatctgctacatccagtctgtagttcaactgatctattgagttcttaattttaattatttcatttctcagttctgtaatttcctttttttttttttttgagatagagttttgcttgtgtcacccaggctggagtgcaatggtgcaatctcggctcactgcaacctccgcctcctgggttcaagcaattctcctgcctcagcctgccaagtagctgagattacaggcacctgccaccacacctggctaatttttgtatttttagtagaggtggggtttcaccatgttggccaggctggtctcaaactcctgcttcaggtgatccacctgccttggactcccaaagtgctgggattacagatgtgagccaccacacctgaccagtaatttccatttttaaagagcctagatttttttagcagcattctcatcttaaatcaatttttttattatattatcacagttgctagggactccgtgtttgacaacttcaatagcwgaatctcgtgaggtttttgtttttgttttttgtcttggtttttgatcatttggttttgtctttttgcatgcctggtaatttttttattgtgtataaaacattgtggagactctggaagatgacatctcctccaaaagaaaagtttttctgctggctattgatgatagtagaggcaaatcactttggtcaaatatgagattgagatgactcaaggcaggatctattttgtttgctgttactccaaggaagtaatcctttagggtcccagttaaaagttttgagtgtttctcaaggctcctcatccttattggccatgaattccaatttttgccttcctgtaattaggcaactgcaaaaaagctctgcttaatttcttgcctttatagctaccccctttttgcttggtttctctgcctctcacygcacccagcttggatatcagcaaatgcctcaaggctaataactttcaacaatatgagactcatacctctgtggttctcatatttctacaatctttgctcctgtgtcctaactactttagtaatcctgaactccagtttttttctccccagccccataagactggaaaactctaagctgttgctttttttcttctttgcttataaactggcaagtgtcttgaggggaaaattgatagaggtcaaacttggtctgtttttcatctctctgggatcttgttccctcaggacctgccttggttgacttccartcccttaagacaatattttatagctgttatttttgatcatgatagtgaggttgactaaaaatacaagctatcccgtcgtagctgggaggtgcactcagttggacagtttaatacatattaggaaaaatggcttatttttgttttcttcaatatggagaaaaattaaactttaaaccacataaaaaggcagactctaaatgaattgaagacttaaatatgaaaggtaaaattctaagtgaatagtttaacatgtagacaaattttaaaatcccaagaatagagaaaggatttttacacctacaaaaagaaattattaggtaaatatgtaaggattttttgttctacaaaagataatagaaataaagaaaacagacaaatgaaagactaagagaagaaatttacarcattcgaaaaacacattgaatacctagactctgtaatgcactccagcaaatcagtaagaaaaaaaaaatagaaaacccagtagaaaaatgggcaagcataaaagatctgaacagacaatttccaaacattcatatggcccacaattatgtgaatatatgctcaaactcactagtaatcctagaaatgaaaatcaaaataactatgagttattgctttccatgcatcagtttggcaaaaagtagaaagtggggccgtgccaagtgttagcaggaaattgtgaaactggaacccttatgtacttctggtggaatctagaatggcacaggagttatgaagaacagtctgctagtacttgttcaagttcagttcacatatactccataacacagaaatcctccaccttggctataaatacattttaggaatgtgtgtgtatacatatatatagggagagatactgcattttaaaaaawgaagatgaatggagatgttcattgcagcattgtttataaggtggctgagagataaaggctacctagctgttcaccaccagggcaatgcataaattcaatagagtgggtgtgcagtatagaattatagctacaagctagatatgcatccagtaacatacacatgtttaaatcagtgcagactgaaaataaacagccttctaaacagagtgagatattgtgcacattattcattaaattaaaacacatgccacacataaaacaacatggcatcatttataaggaaacatttacatatttaatatgtcagagtcattgtctagggcrkggtggaaaataaggataaatgggaacttttaaaaatcttgttggaagaaggtgatggctcaaataagatttccttcctccctgtctctctctccctctgccccttctttcctcccttcctccaacagatgctaactggatgatggaatgaacaagattctgtgttaagtgctgtggaggaaataaagatgatttccccattggcttggccttcaagaaccttaggcaagggcctaaggtgaatacaccagaagccttagtagcaatactctgtcccagagttcagactcataaacacattcctgctctgcttaaaatcaacaaatgctgttttggatgtgtaagagctcttaaggatgacagcaacactcagtaaagtaaataagctaygtgactgaggccagaagtgtcacactgccgtctctttccttagcaggcttttctgataatacatatgacatagctctcaaatgcaaatgcctatagggaccaggaggaaataccaatggaaaaagagggtcaaatttaagagagtagggagtggtggggactgtgacaaaatggagcccatatgccttgacttaattgggccgccactgttcagtgccagctggttgctgccatgcaagaataaggcaatactcttgtattttcaagaaaagccaaaaatctagatttttatgtgaaattgtctcatttttaaatattggcaactacctcaaatatttttaaaccctagggagtggggaaaacaattcattttgtttttaaccacatttggtcagttggctaacaatttgctgcttctaatactctcatagcatctggatatctggaaactagtgatattttttaacctyattgtttatttttttaacctttcattatttgcacataccgaaaagaatgaagggaatgagtttagataagatgcaaatttctggcacctgtagccagataaaagatacaatgtctaccatttgctaagcaccatacaatatgctttgatgtattagagggagcaagacacctaggcctctatcctggagtgcctgtggcatttgagaaacaagaaaacaggcacccaggatgcatgtatacgtggggacattttaggactcaacatttatataaacactggagatatatatataatatatctctatatatstaatgtatatattatatattatatataatatctctatatatctaatgtatatatatacacattagatatattatatattatgtattatatatcgatatataatatatagatctatataatatctatatatataatatataaatctatataatatctatatatataatatataatatatctaatgtgtatatatatacattagatatatagagatatatatatctctctccaatataaagatataaayaatagagctgatttgtgtattagcccattttgcgttgctgtaaaggaatacctgatactgagtaatttatttcaaaaagagatttatttggctcacggttctgcaggtggtactagcatggcatcagtatctgttccgcttctggtgaggccttgggaagcttttactcatagtggaaggtggagggccagcaggcacatcccacggtaacagaaggcgcaagagagatgcccgactcttttaaacaactagttcttctgtgaactaatagaacaagaactcactcataccatggagaggacaccaagccattcatgagggatccatccctatgacccaaacctctcccactagccccacaacactggggatcacgtcacattttaacatgagagttgaaggggacaaagtccaaaccatatcagggtgggattctgtcatcagatcaaaaagtccatgtacagaaagtacttcctatgtgcaagcctgagataagggctttcttatttaaaaattatwaagtgtttcaggcatacaaagatgggtaaaacatacaaaagtagggtacccagcatcctgcttaactgatacaggggttggcaaacttttgctgccagatactaaataccttcggctctgcaggccacacacggtctctgttgaaactactccgcttaacactgtggtgtgaaagtaaccacagacaggatagtaaaccagtgagcagggcagtgttccaataaaactttacctatggacactgaaatatgaatttcgtgtcattttcacatattatgaaatagtatccttcttttgattattttgcaaccatttaaaaatgtgaaagccgttccagacttgggtcacacaaaaacagctgtgggctggatttggcttacgggccataggtagtgtcagcccctgaattaaagcactacatagtctgagccccccaggtgccacttccaaaattacatcccctcctacccccagagttagccattctcttgaaaacagtgttgatcattcctgagtgtaattttgtttttgtggaatgcatctgtgtccattaacagtacagttggttccaattcaaggattcagttaactacagatcaaaaatattcggggagtggggcaagcacagtggctcacacccgtaatcccaacactttgggaggctgaggcaggcagatcacctgaggccaggagttcaaggccagcctggccaacatggcaaaaccccgtctctactaaaaatataaaaattagctgggtgtggtggtgtgcacctgtaatctcagctactcgggaggctgaggtaggagaatcacttgaacctgggaggcagaggttgcagtgagccaagattgcaccactgtactccagcctggaagacagagtaagwctctctctctctctctctctctctctctctctctctctctmtctctctatatatatatatatatatatatatatatatatggggcaaaaaaaaaatacagaataaaaataatatatgttttaaaacaatgcatataacaactgtttacatagtgtttacattgcgttggacattataagtaatctagagatgatttaaagtatatgggaggatgtatgtgggttatatgcaaatactctaccattttttataaggtacttgagcacttgccaattttggtgtccatggcggggggcgggggtgggtcctggaaacagccctcctgggatactgaggggcagctgtatttttgaactttatgttgaataagcatttaagttgctattaaaatagtgcttttttttacatgaatcatctttttaaatcttcaccgtgaccattttccagatgagaaaacttttgacttagagcagtttggtaacttgctcaaagtagtgggtagcacactgggatgtgaatttgcaacctttttacaatgggatctgagtttataagcaccacaccagcgatcgctacgttgtgtttcattaaccaagtaataactgatcttgccaaggatraccttatgataacgacgtgctcacaataaatttagcctttctctgaagacaactgcaggttaaatgttactggttgtagttcagaccttggaaaattgctacgccatgtacagtggtgtgtgcgttaaccagaaaccttaytttctaaacccagtgggtgggaatttattaatatttattttgagacagggtctcactctgtcacagaggctggaaggcagtggcacgattagagctcactgcaccttccatctaccctggctcaggtgatcctcccacctcagcctcttgagtagctgggactacaggcatgtgccaccatgcccagctaactttgttgtatttttttgtagagatggggttttgccatgttgcctaggctggtcttgaactcctgggctcaagtgatctgcctgcctcagcctcccaaagtgctggaactgaaggtgtgagccaccatgcctggccagaatttagaaggagtgactaccaacatggtgcaagaattagaaatgttttcaattaaaaaatgagaaagaccaaaggagacctcatccctactctcccctgcccgcccccyataacatattataaaaatcatgggtgattcaggagccagtatgttctctcttggtcaggtccacagtgatgagctgttgagtgttgccacctagagagttgttaatgacacttacgccttttgagcttttctccgtccatgcaagtagtaccrtgtttgtttgtttggagatggagtctcattctgtcgcgaggctggagtgcagtggcgcagtctcgactcactgcaacctctgcctcccgggttcaagcgattctcctgcctcagcctcccgagtagctgggactacaggcatacgccaccacgcccagctaatttttatatttttgttagtagagacggcatttcaccatgttggccaggatggtctcgatctcttgacctcgtgatccacccgcctcagcgtcccaaagtgctgggattacaggcatgtgccaccacacccggcctgtttttctctcttaaccacagtcaactccacgttctccccaagcctctggcttttggaaatctaaatccaarcgctccctctctgcctgtctgtctctttctcagctgggaagttgccctagtttgctctggctcatttatatgacattgaagagagaccaaaatataatttttctaatggcaaaatacagcaagaaggaggggaatgttttaatcaactgggtgtattctccagcrgggagcaagaacttcattttaatttctcatttccctttgatgaaaagttgagtgaatttttatcatgtagaatttataagaagtctgggtttaggtaatcagttgtaatatttatactcttagggaaagaaatmggaatcattagcaagcrtgcataattaatgaataaattatatytccctttgttttctttcaggtacaaggaaatggtagaactagtgatctcacccagcctcactgtaaacagcgattgtctggataaactgaagtttaaccgtgctgacgctgctgtgtggactctgagtgacagacaaggtaggcttcctgctgtgagtttgggtcaacaggtgtggtggtcctaggtcaccctgagaatatcgtaagcaacagacacgcatcctttccaaagtactgtccttaggacaatttctccccctgccatttaaatgcttgcctctgaaccaaaactttggcatacatctctaacaactctgtctcatcgttagaggtaaaaatgtgctcattcgtgtcttgaacttcctttcttggtctccaattccaagaaatgctgacaccaccacggatgatagtcactttggggcgtgtcccaggcccagcccttggatgtgttttgcagtgtctgtttctggctctgagctctgtcctctctactctgctctgccatccccttgtccaagcaggcgtcttgcttacaggggtttgacattagggcaagaactcgtctgcctcttgctttcaggtcgggttggagtcaaggaagcagagaagaattaaagttgtttaaaaaactattggcaaatgatgcagtcgaactagttttcactagaacaattccagctattgtttgttctgtttcagatctgtcagccttcctggtagagcttggagttagcaaaaggcattaagctattatgtttaaccattgggcttaaccctttctttggccagctttgggatttgctgctgttgtcctgagaccccctcgttgtttttccttcattatctgtttgacaccagctcatgggacacaaatgctatgtaactgtcgtggaaaaccaaagtgacacgtatctagtggaatataacatcacaaggaattggctttgaagccaatccaggcttccatgagtaattattgctgtcagcaagacaatgacatttctccttgcatgctggttacagagctggaactgcgctgatgaaagtaccaccagtggcttgggctctcatgccaaaactggatggtgaagaacataccctcattcttcctggcactttggaccattcgtgtaaactgcccaggggcctttgagagtttgagaaaatttactgagccccgttcaaagacattcatcattttctttccaaatagagacacaagtcaacttaagtagagacgcaagtcaactgtcttcatttgagagcccgtagtaacaggaaaggacataggctgctcaggggggaatcccagcccactgcttctcagccaaatgatctcaggcaaactgtttaacttttctgagcctcagttttctcacctgtcaaatgggggcataatggcrtacttcatagggtgctgattgcaagaaggaagtgaggtgatgggatgtaaagtgtctggcacaccttgggggcatggtgcatggttaaatgtaccattccattgtcactctcctctgaaccaaataaccacagtaaattcaaaaccatggttgcacacagggcagcccacagccacatctggccctgaagtttgtctttgtttggtttacactatgttttaagtaaaagtgaatttgtaaaaattgggagcattcacataaaaatctggagttctggtttatcttaaaagactgaaggctggctgggagcggtggctcacacctgtaatcccagcactttgggaggccaaggcaggcggatcacgaggtcaggagttcaagaccagcctaaccaacatggtgaaacctcgtctctattaaaaatgcaaaaattagacaggcgtggtggcacacacctgtaatcccagctacttgggaagctgaggcaggagaattgcttgaacctgagaggtggagtttgcagtgagccgagatcgtaccattgcactccagcctgggcgacagacgtgagactccgtctcaaaaaaaaaaaaaaaaaaaaaacgctgaaagctttagcaaccctgggcccccacattccccgattccccgctggctgccaccagtaggagctgagaggctgctgtcctgtagatgaatccccgcctctcccttttgtccttaattgttatgagcacatactttctgccaggcactattcaaagcaacataaatctagattcattctcctcctccctccctgtcaccatcagaacaaacactcggcacttgtcgtgtcccagcattgctctattaactcatttaatcttcacaactctaaaaagtgggtactgttattatccccattttacagaygaggaaaccaaaatgcagagaggttaagcagcttgattgagatggcacaggtgatagcccagatttgaacctagatagtctgacttcagagtttattctcctgatcagtactctgtactatttctcatttaattattatacaactggtaggctatgagcccattttacagacatggaagttggggcatggaggagttacgtaaccaggttaaagtcacaccagaatcaaacccaggcactctggttccagagttcccacttgtaaaccacttctaactcactttctgccaagctgtaagagtctccagaccctggatcttcaattctcccacagtggtgaaatccacagacacactcctttttgtgacttggagctgtcagtgccctttctactgccctggaacaatctggctgccatggtgaaggctttgagggtggaagcgatgaggcagagagaggttgctcccaaattcagaacaggtagcgccagtgaggtcaggttacacacacacactttctttctcatgggrcaggtggtgagctccagagactctgcaggggacattccaccctggagcatgacccccaagtgctggattatgcctctccccctgcctggcctactgttctccctcctcctgggccattccttctattacagagtctttactaggtggcttcaaaggtcctactcaaaggaggacccccaagagtcatgagtcacaggacctgcactcagggggattctggagggagcatggagccaagaagccccccagtggcttccattgcattcccacctctgcttcttaccagctgtgggaccctggctagtggcctaacctccttgagacccatttgccccatctgtttaatgggagtaattattccaccgacctcacagactcaatgtgaggatgaaatgagttgaaacagggagtggacttagtgtgcttaaaaagtatagaacaagatctgaattccttatccttggccaccaggccccacttgtctatccctggaagcctcccaaactcatctccgtccctattgcctttgctccttgggcccagcccctggccccttttcctttgctttaactgagaagcatgattctgccctccgagcctttgcatctgctgtttcctctgtctggaccagtcttcacccaggctctgcaggaccagccctccctcagttctcatcagagaggtctttcctaatgaaaggaactrccccttccttcattcatttgttcattcatttattgaacaaatgtttaatcagccatgtgcttggcatggttttaagtactagggagacagcatagaaaaccctatcctcatggagcccacgctagggtgctgacaaagcaaaaagctgacaatgacgataaagaagcaaagtatttagcacgttgcatagtgatgcttgctgtgaaggaaaaaggcaggggaggagcatgaggaatgcaagagtggagggttgcagtttttgttagggtggctagaaaagaggtccctgagaagataacacttaagacctgtaggaggtaagggagggtgccacayggctacacagaacaagagccgtatgcacagagaagacagcaagtgcaaaggccctgaggcagcagtgtgctcaaaaaactttacatatattaatacaaacatatgtacatatgcatatttaaatttctgttcctgtttagcatgcaacttagtgcctggctcatggtagatccttaaaaaattatttctgggtgagtgaaggggtaggtggatgaagacagaatggtgctgaggaacccagataactttagggagatattggttctgaatccttagtaaagtttccttcacttccccctgcctcattttctacatttgcatcgtactgatgacaataatttccttactgcgttgttgtggagaataaagagatcatgctcatgcagtccttgccacagtaaccctggtttgtttgtaggaaccacttgagaaatattacctattattccttatgattcaagggaaaaatggatttgaattgattgtatcctgtctctgggaaggggtggtggggagttcccctgaatagaggaaaatttttcttttaaaatgcacatgcatttttcagaaactgatgctctaatctcattgtttccaaggagaggtgaaaccaccaccctacgctacaagctgggctgtcagctgctctcacttcctgcacctcctctgccctgggcatgacaagacctcattttcagtttcagtctcaccggttccaacccggggctgacgggttttgattcatttcatccaaaccaggctgagctgcccagagctttgcccaggtgctggcctggggaaccacatgtcagcttcatccttctcacctttaaggcttttgtagccgttcacacccagaacaacctctacctgtgcagaacagaaatcccgctttgtgggaggaaatggtgctattaatcccatcgtggcctccacaggtaaagagcttccactgatggcagtagctcacaaatgtcatagtctcgagccactttctggcgtatattcagaccacctctactgccacttggtactaatttgttctttttttttttttgagaccgagtttcgctcttgcgaaccaggctggagcgcagtggcacgatctcggctcactgcaacctctgcctcccaggttcaagcaattctcctgcctcagcctccggagtagctgggattacaagtgcccaccaccacacccagctaatttttgtatttttagtagaggcaggrtttcaccatgttggccaggctggtcttgaactcccgacctcaggtgatgcactcgcctmagcctcccaaagtgctgggattagaggcatgagccaccgtgcctggcctgttgtttctttaaaacaactcctttgaaataaattcattttaaaaggatgacttaagccagttccagaaatgaaacgttatgactttgatggtcttgttgtgattctaatgtacataaaattaatttgcaaygatttcaatcaaagagggagtatttatagactccctaaaatcatcgcagtctgggacttgcagcctcattcctttctgtcctcagtggcacctcccgcaagagacaaagggcttgctcatggtcacagagcctctcagtgacagtcagaattggggcacccacttctggatgcctagtgtggtgtctttccagctgtccctgtccctagtatgggagtgatttaaatcacccacacaaggaagatgaactgatacagtttacagacatttacctttatagcagagacctgcctggagacatctcgctggcactacaaattgtctcatctcactgggggatcccttagaagccggcccctggggtccaattaggcaacataacagccgttgctgctttcagaatcattagcttcttaatcctcccagtgagaggtgaaaaaagtgtgaacattcaaattgtgctcatggatttaagtggcttaaccaagggcccccaggagagtggaagctaataatagctcctctgtgctgagcacttaaccatttgccaggtacctgccccatctgcatatgtgcaagatattgccccaatttgcagatgagaaaactgagactcagagggaagaggtgaaggacacaaggtctcatggctgtattgcagcacagccaagatttaaatttggatctgaccccttaagcctatctgttttctttggaaagaacatcaacaaattatgagaatgggttgtagatttggcctacggtaggtgcatgataaacacttgttgactgcgtgaatgaatgaaacatggtgtgtatcctcgggtaagttgcttcacacagtcactcacatacacaattgcacataagtatgcactcagtatgcacagactgaagctttaatttcctctcttaaaactggatcttttgctttgcacatttatattgtctttgtggccccaatatgcacttgagtttgtgtcttctggaatggagatttctttttatgaaccccaaattgtgataatgcttagtgatgtgtagttttgtattagccagtggtctaaactcttactcctcaaagtgtggtttgtgaacctgcagcgtcagcatcacctggaggcttccttgaccaacaatcagaacctgtgttttaacaagatccccaggtgaatcctggttccaggtgcactggtctcaaatgtccattgcttcctttgcacctcgttataattgcagttaagtactcatttgtgtgattgtttgtcatccatctcactcactagacaggaggcttcgggtccataaagacagggaccctgactgccttggctcactgtattagtccgttctcgcactgccataaaaaaatacctgaaactgggtaattttaaagaaaagagatttaattggcttacagttctgcaggctgtacaggaagcctggctcaggaggcctcaggaaacttacagtcatggtggaaggcgaaggggaagcaggcacattttccatggctggagcaggaggaagagaggggggtggcaagtgcgaaactcggtctcaaaaaaaaaaaagaacaaattagtaccaagtggcagtagaggtggtctgaatataygccagaaagtggctcgagactatgacatttgtgagctactgccatcagtggaagctctttacctgtggaggccacgatgggattaatagcaccctttcccccmacaaagcgggatttctgttccgcacaggtagaggttgttctgggtgtgaacggctacaaaagccttaaaggtgagaaggatgaagctgacatgtggttccccaggccagcacctgggcaaaggtctgggcagctcagcccagagarctcactaacgtgagaacatgataaaacttactcactatcatgagaacaggatagaacttactatcatgagaacatgaagccaggggaaaatacacccccatgcttcagtcacctcccaccaggcccctcctccaacactggggattacactcactgttgtaacccagttctgaactcatgcctggcaatgaatgaatgagctcagctgatccctctctcctcacccataggaagcttgggaagtagaggaggctcagagtttacaattcagaaggaaatagaggaggcactctaccctccctacttggcagccagctggcccgttatgcatcagccacagccccttcatcctgtgggttcattctcaagccctgggggaggatgaagaaggggcaaagctcagagtaaacagatttggttctgttgggcgccaggtcattagagctgctttcactaccagcaaagtggacctaagttgccatcaatgactcctccattgaccttgacctcatagcctacatggtccaatatgaatccatyacggcaagttcaagggcagcaacaaggttgagaacagaaagctatgatcagtgggaagtccacctccatctgccagacaccagatcccaaagagggcattgctgccttcatcaccctagagatgcttggagctcatctgaagaatggcatcaaaggggcatcattctgtcccttgtgctgatggtctgtgtttgagatgagggtgacctactccctttagatttccagcatgccatctgcttgttcccccagaagggtctatgacaaccatggcatcataaaagtactcatgaccactgcctgtgccctctctgcccatctggcaagctgtggtgcgatggccatgggactgttcagagtgtattcagtggcactgccaaggctgtggcaaggtcattcctgagctgaacaggaagcttgctgacacagcctcctatgtccccaccctcagtgtgtctgtccaggatctgayctgccatctagaaaaagctgttgagcacagtgacatcaagaaaatgtgatgcgggcacctggggggtcattgaaagaaattccgggctacactgaagaccacgttgtcgcttgcaactgtaacagtgatgcccacttctccacctgtcacactggggctggcattgcccacaaccaccagttggtcaagcctacttcctggtactgtgatgatgtttggctacaacaactgcagggtggacttcctggtccacatgacctctgaggactaagggctctggaccaccagcaagtgcataagaagaagaaaggcgttctctgctcttgggcagtccctgcccacctctgtgccaaagcagagaatctccacccttgacagtgtcccatccaaggctcccagaggagggaaggagcttagagagccctgccttatcatgtgtgtttatgataaggattatcaatgaagtccacaccaccctaaccatggagaaaggaagcagaaagggaggcagaagatcactctacatagagtttaatacactcactctccagtttctcaattcctccaggtgtcctgggatgaaaaggttaaatgcgattgataccagcagaaaacagaaaaaagcctgtgttttttcaaaaatcacacaattgccaaaggaaaatctctttgcacttacaaatgcctgtttctcgcttgcacagtcttcctgaggttgctggggtgggaaagggagagtatttacaggtctgcgtagtgggggaggggaacctgtctgctggggaaggcaggttgctcaattcagaggaactgggtggaagcttgaaaaggagctgggtgaggcaaacatgcaaatcatgccatggagattggcagaaaagacgcttgcctccaatttatggaatgcsaagttaattygagcccataggaatgttgttcccatagatttagatttttatgaatatatacatatttatgaaagaaaacatttaaagtgtttaattcagtaacttatgcagtactaaatgcactcaagtcatgggcttttacgaggaatgagattgtggctgcttcagaatgagacagttcattcttragccctgtgggaggatgaagaaggagtgatggggtacaggacaccccgcctaggagcaaacccagggtagggaaatcagcattgagtgagcacctactgtgtgccaggggctttccttgacattcggctactgttgttccatccttttctttgaatgtgatacatgatgcgaaatatatttctgcattgttgaatgcacgtgcatgcacacacaacacattctcacacctggacctgcaacaaaagggttacacaattccttcttactatgggcaatacctgctgccatcgtatatcataaaataggcaattctccttttcttaattccagttatgactctctaaatgaacttcaagaccaccacccccgccccaaccccagtggtttgggacttgaacagaatttggctcagccagggggagggcattaagagtgttgaccttggactcacacagcttttgggttcaagtcccagttcccttgcccacggttgtgtgacttgaacaaggcacttgaccttcggagccccggtttcttcatctgtacaacggggttaatggcatcgcstgctcagagcgctgttgtgaggactcaatgagagcctgtctataagcagttaacaagggcctggcacatagtcaacctctaagtgaatgccagctgctcttatgacaatgactgtcatcgtcagctgtagtgtcatggttgagaagacagactctggagccagaccacctgggttcagatcacagatccacaccgtacttcctgtgtggccctgggtgagttacttaagctctctgtgcctacagctgttcatctgaggatgagaatagaacctttctcacagggtacttatgaggattaaaataattaatccaggtaaagaatttagaagagagcttggcacgtaataagcactgggtaaatgatggctatcagcatcatctcatttaatcctttcctgtccttgcaagataagtattttcatcctcattgcacaggggggagccctgaggcccagagatctaggaacttgcctgaagtctcataactaggaagtggcagagttgcaagtgcacgttggtctcctgagcctccagcgcagaggctgaggcaggctcagagctccacagccttaggttgtgatgatgacgcagccactgccctacagaacagggagtgggcattggcaggttgacgctgttcccatcagtagacacattatctagaatttgtccaggactctgcagtgaggacattgagttgcattgttcaagatgacggagcacaaaagtacttcccagtgaactgtccctatgtaaaattatccccgggcaaacgtctctcccagcttaactctgtcaccttttcgtcaccccctgcatatcgcctcccatcratgattggacattgtgtgctgagtgattgggtgttaggtacttgcatcaggagcccaggtgtcatccatctctctgctccaccaccctagatggagcttaggagatgatcgaagtggttccttcccctaaagtgttggggccagctgcacctgcacyccatggactggaagtgaggaggcaggggaggaacatcaaagccatgtcattagaagaagggaaatggaggttggatgagcaaagccagcctgtgtctgccattctggggttcttggggattgcttttgaggcagggaagggagcggttttccatccaggagtggaaatggcaccagcttgattcacttcctagttgtgctgctgcctggtcatgtgacttggctcaagcacattctttctgtctctttggcctcagtttctccatctgtacaatggatggagaaatggactctactctgatgtttcaaggtgctatggattctttagatgtcatttttccttaactgcacagagacgaagtgcacccagaaagggctccgaactcctcaagaagaagagtgctgagatgtggcgcctcagataagcatctgtgrtggagaaagccgcgggcagcacccctccaagtctgctcctgcttaagtggtgtctgaagtcaccacctctgcagaacatcaccctaatcgctaaaactcttccaatttttctttttctcctgcaggcatcaccaaatcggcccccctgagagtgtcccagctcttctccaggtgagtgccattcacttgtctcctgctcacatgcccaccttttcgtctttcttggaaggtagaggttaagagagagggccctggagccagattccctggataggaatcccagccgtagcacttcctagctgagtgagcttgagcaagtcactccacctccctgggcctgagccctcccatctgggagcgggggacagtcatgctgcctgcccccacgaaaccagcaaaagcaggtaaaacacacttagaatggggcctggagcagagtgtcctcagagtcttagctattattttcttctttcttctcttcattcttttttttttwttattcttttctttctccccttcctctgctttcccatgcatagggaatttcttaatttttccctccctttttgccactgtctttctttctcctttcctcattcctttcctttcccttcttttcaatctcccttctattttttttttctccgagacagagtcttgctctgtcacccaggctggagtgcagtggcgtgatctcagctcactgcaacctctgcctcccaggttcaagtaattctgcctcagcctcccaagtagctgggattacaggctcccttctttctatccttatttttctctccctttttctctttcccttcctctcttccctcccctttcgtcccccatccttttctctccacctctctctcccttttcccctccctcctttcatcatttctttactttattttaagttccagtatacacatgcagaacatgcaggtttgttacataggtaaacatgtgccatggtggtttgctgcacctgtcaacccatcacctaggtattaaattcgacatgcattagctattcttcctgatgctctccctctcccctacccttccctaacaggccacagtgtgtgttgtacccctccctgtgtccatgtgttctcattgttcagctctcacttgtaagtgagaacatgcagtgtttggttttctgttcctgcattagtttgctgaggataagggtttccagcttcatctgtatccctgcaaaggacatgatcttgttcctttttatggctgcatagtattctatggtgtatctgtaccacaatttctttacccagtctatcattgatgggcatttgggatgattccatgtcttggctgttgtaaattgtgctgcaatgaacatatgcgtgcatgcatcctttcttcctcctctaccattcacacatcactcctcagtacctaaccccacactgagccctagaaactcagagatggatgagatgcagtctctgcccccrgagagctagtccatattgatggatgagacaccttccaggactggggctgacatctccagctcaaatgagtttcttatgcattttgcagcaggttcccccaaataaccctttatcgtggcagtagtctaaaagaaagaagggcatagggacatctgtttataattccataaacttttgcattcacctgctrtgaggcctcaggtggaagaggaactctggaagcaaacaggctttagcaaaagtgatgtaaccaaaatggaatcagatacagattggggaatctcatcaacatttacctgtacgcttaacccagttgtgacagttagaaacatgatagttgtggtgtctgggggagggtggcatagtggaggggttgagggtgtggcctctggagccagggttcaaattctctatctgctgtatgcttgtggcgtgttattaagtctctctctgcctctgttttcttacctgtaaaatggggatagaaacaaaaattacctccaaggcttatcacagttgtggtggagtttaaatgagccaattcacatgaagtaaataggacagtgcctggcacgtaggcatgagaattgactacctttaccactaagggaagtggcccttgtaggcattgttgcagacaggatgtgattcggtctcaagaggtggctgctgctcaaatccagctgatagcaccacacaggcgtgcagacccaggtacgctgaagcacctgcttttcaggagaaggaagacaaagcgagtgtgtttatgtgcatgcctgcatgtgtgtgtgtatctgtgcacgtaacctcctggttttcaaattttaacaacaatttcaaattaggaaaaaaaataacttcactggtcaaagaaattatatccatggatctgtggattggatgtggcccctgggccaccattttgctccctttgtgttagaacaactgaccttgactttatttattgctatctgcagggctggatgaatcctagtcctgtgaggaatagcagattcatggttccaagcatgggctctggagtcagactccttcatttaagctctatatttaccactttgtagctgtgttttcagctctctgagttttggtttcctcatctctaaaccaggagagataagagcctccaccccagagatttgataagagcatccatgagatataatgtacataccaggtgcatgtgacacaattcccaacccttagtaaaaaacacaatgcttggcagcacccatagtataaatatcttaagtaaggagccctgtacatcctagcccattatagaacctgttgttctccatggagtagagaagtcatttgtggtctttggttgcaagcaacagaaatcaactctggctgatataagtctaaaagcatttttgggggaatatctggaatagctcacaacataaatgaaataatcaggcctcgagagagattaagaatgggacagattcaggattcaagcaatatggaggatttaaattcccagggcagartctgattggatgatcttgcatcatgtccccaccccttagctaagagcaggacatcttgattgacagccctgttaaagctgcagtcaattgagaaggtatctaaattaggacaatcggggtaggataggctatgctacagtaatcagtaaacctcgacatctcagtggcttcacacaacaaaggtttgtttcttactcacataaagtccagtgtggatgrggtgaaaccctgcaaggcagctctctctcctccacaagctgactcagggatccagggtgtttccgtatcatggctctgtcatctcaacctgtgccctccacagttgctatcaaaagaggagaaaggacaggagggttgcgggggatgtgttcattggccaggcctgcgagtggcttacagcatatctgcttacattctacggggctgaacccagtcacacggctgaatctgactgcacaggagacagaaaatgtaatcttcctgcttcccaggcagaggaaaataaaatgggatttggtgaacatgtatgttgtctctgctctggaaagagtagaaccccaaagaaaaatgggggtgttgatatcaagataaggaagaaggggtgccagactgggcctggagatttaatcttccctctttccacacagatcttgcccacgtgtcctcccccgccagccttccacagccatggcagcctacggccagacgcagtacagtgcggggatccagcaggctaccycctatacagcttacccacctccagcacaagcctatggaatcccttcctacagtgagtagtaaacaagtccttactctcctcctcaggtccccaaatcatggtctttgttctgcactattgtctcagctaaatgtggattaatagacacaaccaagctgattttggattagagataaagggaaaagagtaacactttaaatatggttcaaattctatagcctataatatcaagatcccttttgatggcaagaattggaaattgaacccaagctggtttagggaaaattgggactgaatgatttgcataccgagagatctgtggatacagctgtcatcaggtatgactggatctaggtgctaaagcgtcatcgtgaggtgtaagtctctttccatcttcagatgctcccagcaagttctccctgcatggcagcaaagatggtgcctgtccactcaaggtttgcatccttttatctctgcatgcccagtggaaagagagctcatctttcccagaagttccaacagaatcccatattggccctcattggcccaagttgggccatgtggcaatgcttatagcaaggcaaggagaacagggtgwtggagataaggaagctgaagcctatggattatctttgaaggaggggtggttttcttaaaggaaaacagagtggtagtatcagaagaaggagaaatggatgtggtggaggacggggcagaaacaacagacctccagcccttgactgttcacatcttacagctaagaactgaagacttgcgaacctggctcaccatccatgcccacctgcccttgcctctggccttgagtcatgctattccctcgcctcctagctgatatcttaaccaaagcccttttagtagcaagtgacaaaaacccaagctaatcagctggaggaaacaggggaatttattgcctatgtagctggaaaaacctagggcactggcttcaggcaggcctgggtccaggtcctcaaggtataatatcaggactcagcctctgcttccctttctgtgggcctcaggctcaggcaggctctcccactgtggtggcaaagacagccctggcagtttcaggctgcagtgtcccccaaaaagagagcccctcctgtctaggacttcctgcagagtcccaggaatttctctactggactcccacatccatccaagaagataggtgctgtgggtggccatatttggccacatgtccacccgcaggaccaggggtcaggtcagcctcacccaaaacaactgatctgaaggtgaggcaggggtggttcacaaaggagaaggaggcaggaagaaactacagatagccactccacgtgactttacagcccacccaaatccgggctatccagtggaaaggacgtagcgttggtggcagggacctgcctgcctgacttcgctgcccctgacctctccaggcctcagtttcctcaattgtaaaattratatgctcgtttcatcttcccacctagaggggtcctgcttgagttgagtgcagaggctgactcttacatttctttcctccctcctcttcctccatacctctgccctgtttgtttgttcattcattcattcatttattcattcattcaacattgagtcatgtgtggggcagacagtggtcaacaaagcagagcgggccctgtcttcatggagattactgcctaaaaccgatgatcaggcagcactagactcacagttttggtatcaggggtcagtggctctatgtggacaaaagccctgcagacatttccttttagctttagtttgccacagtcctcacccagcccacgttactcccttgaattatctgccttttccatgaagacacttgagtttgcaaactctggcctagagatagaaaaaaaagtttttttaattttctttttttgagacagcatctcactctgttgtccagccagagtgcagtggcaccatcgcagctcaccgcaagctcaacatcacaggctcaagtgatcctcccacctcagcctcccaaatagctcagactacaggcatacgctactgcgccctgctaattttttgtatttttttgtagagatgaggttttgccatgttggccaagcaggtctcaaattcctggcctcaagtgatctactgccttggcctcccaaggagctgagactacaagcgggagccactgtacctggccccagatttttaaatctgtatgtgtaatttcaaattaggatgcacggcrtaaaggaagcaaagacttgttttaggttctagggatgggaaaggccttttaaataaggagcgaaattcagctgagaactgagagatagccatgtgcaggcacagacaggagagcatccaggcagaggggcaggccctgggaatggggaggaacttggcaattctgagaagactaatggctggagcacaatgggagatgaggtgaatgaggtgggcggggcctccgaggcccaggaaagatttggggttctgttccacgtgagactggaagccactagagggtttataagcagtgggtaataggatgcaacttaggtgggttttttttaattttattcktatttttattatttttagagacagggtctggctctgtcttccaggctggagtgccatggtgcaatcatagctcactgcaccctccacctcccaggctcaagcaatcctcctccctcaccctcatgagtagctgggactacaggcacgcactacctcccctggctaatttttttttatttttttgtagagacggggggtggggggtctcactttgttgcccaggctggtcttgaacttcttacctcaagcaatcctcctatctctgcttcccaaagtgctacaatgacaggcatgagctaccatgcccagcctaggttttaaagatcacactggctgctgtggtgaggctggctcagaggggatcaggaggagaagcaggaaggcccgttgggagacggatgaagcctggagcaggaaatgttggaggcctggggcraggccatggcagcggacagacacatgtagacagaatcaagagcaactctagaggcagaattgacaggtcctgtcgaggcatcagtccaggcttagtaatagtcaccatcgttgacttcctgtcactcacattggtttatttccactaattcctttaatccccacctcaaccctacgaggaaggtcatctcattatcctcccttgagcgataaagaaacagagactcagagaggttaaataacttacccaaggtcacccagctggttggtggcagaggtggaattaagcccaggcagcctggctctggaccccgagccctcacccacggggctccgacgcctggctgtgcattctgtaaatcccgggggattacctatgacagaccttggccaacaggtgtgggcatcttttctaacttttttccmctgctgtgctagaaggcttagaatacaatcacacataagttaccccrcttggctgacagccaagaaaaatgaagccatattctttttcacataaaagagaaaactagccctgttcccagacaaaacatggcatcagatggaaatcaatttggtgcaaagttattttactgtctcagttacttttggagcgtctgctcctggatgatacagagtagatgataagagcacatgtcctggaattctgctgcccagattcacatcccacccttgcctgttgcaggctgcaagaccctgagggagcagcctcccctccctaaacctctgttttcacattcatacaatgggagtaatactaagtctacccctctcatgattgctgggaggattaaatgagatcatctacaccaggggttggctatcttcttctgtaaaggcccaggtggtaaatactttctactttgtgatccatatggtctttattacaactactcagctctgccattgtggcgtgaaagtagccagactgaatgtaaacgaatgggtatgtctgtgttccaatraaactttatttacacaaacaggcagtggaccagatttggtccatgaccctgatctagatgaagggcttcctcaccagggcccaccccaagagaaatgctcaacaaatgtcacctgtcccagtagaagccaggctgccacacacacacgcgtgcacgcacacacacatacacacacacagaatgtccatgtcactgaacaataacaggtggatgaaaagccgtttccctttacatctgcctgtgcctgagcaagctgtgtttgctcatcgtctggacaaaccttgttgaatcttgtcaggaaactttttacattgctccttggcaaatagtgctatttactttgtttaaatacctgcaggaaataacacaattgagcaaactagagacaaggacagttagtgtattgagtatttttttctcaatttattatgcaatattaaagacatacataatagagtaatactatgacacctatgaactgaccattcaatttaaaaaataaagggaggtggctttcctttcctctcaaagattcctgtgcccccaagtttcatgtttatcattcccctgcatttttttatgtagaagagatcaacaaactttttctataaagagccacatagtaaatatttttgtcttagcagaccacacagtctctatctcaatcactcaactctgccattgtagcatgaaagcagccatagacaaagcataaacgaatgggctgtctatgtctcaaaaaactttatttacaaaaatgaacagcagatgacatttggcctatgggctggagtttgctgacctttaatgtagagtattttaagcatgttttaaaactttacctacattgcatcttttagtacacattcttttgcaacttgctttttccacccaacattgtgtctgtaaaatgtatccctgttcatacaagtagctgtagttcattcattttcactgctgtataatattccactacttgatggcaccataacttacttacccattctttagacagtcttttagggctttgtttgtttctcattacataggatgctgcaatcagcatctttgtgcatttctcaggggtggaaacctatgagaggaatttctgggtcatggggtatatgcattcttcactatcctggataatggcaaagaattttcattgtctctggctttgtaaaaagccactccagaacttagtggcttaaaataacactgacgtattatttctgtgggctggccagktgggcctgctgctggtctcccacagtccctctcatgctgctgtgctcgcagcaggtgggctggggctgcctagatggcacagtggggcctctctctcatgtggcccttcctctgggtttcttcaggcatggtgggctcaggttccaggaggctgaagataaaagcttcaaagcctccgggtgctgagtctcaagaactactgggcgtggtggcacacacgtgctcccagctactagagaggctgaggtgggaggatcacttgagcctgggaggtcgaggctgcagtgaactgtgagcatgccactgcactccagcctgggtgacagagtgaaatcctgtctcaaaaaaaaaaagtagttacatatttattttaatatgcatttatatctacatatatatatatgtgtatgtgtacaaatatawatataatatatataaaatatggaacctgtgatttcttggtcattattgcttaaggcaagcaaatagttttaaaattgagttgattttttttttttttgagatgtagwcttgctgtgtmtcccaggttggagtgcagtggcatgatctcggctcactgcaacctctgcctcccacgttcaagtgattctcctgcttcagcctcctgaatagctgggattacatatgtgcaccaccacacccagctaattttttgtatttttagtagagacagggtttcaccatgtttcccaggctgatcttgaactcctggcctcaaatgatctgcctgcctcagcatcccaaagtgctgggattgcagacatgagccaccatgcctggcctgatgtttaaaaataacatgaaatgaatcattatatggatggtgctggggtatgggaaaaccaagcaagtggtgcacaacattgaagatggggaagcactaatttggtccaaaaccctcattgtagtcacgaggaaactgaggcttggaaagcagagggcacctgcctcagtgataccacagagccaggacaggaaacgagtactctgggctgtgccatgtgccatgggctgatccaaattcacatcacggagcacctgctcagggggctgttgatattttaaacttgaaccatctcctgtctctcctctgctcagatccctccagggcccctctcaggatcaaagccaaaggttttccactgcagtatctttgccctgtccccaccttgatgatctttctgacctcatcactcaccctctccccaacccttaccccactccagcctcactggcctccttgctgttagttcatccaacataccaagtacactcctgcctgaggacctttgcacatgccttccctctgcctggacaggtattccttgctcctttgcttccttcaggtctttgttcaaatgtctcttcctccatgggacctcttcctcctcctccaagggacctttcaggatcactctgtttgaaatttcaaatcccaactccccttaaccaactttgctacctccttccctgcttcattcttctttttagcaccataagactctaaatggagtccaaaaaatttaatcatgtttggagaattgtgttagtktgaggttcataagatagcagggaaaagtgtgtgccgctgagtgtgccagggagtcagggagccaatcatgttgtctcttgtgttacccaaaaagtattttgtatgcttctcctctactgtgtgtttttacttgtttttctgctgtcattctcctcccactagcatataagctccaaccgctacagtatctgcagcatcaagatctgtatctcctgacctgttgcaggtgctgagctaatagttgtgaatgagtgaatgaatgcttattggctgtctgttgttgacaccctctctgaaatccacatgctcactttggtgcttccatgagtggaagccagtggaacttgcagatagttcacgagcaccttttcggaggcctctttctctttgctgtgaagatacttatcagagatgcctgcggagtagcaggtctgatgagatcagtctgtccccaggccaaaccgtgaccagatttcctttgaacataatctcttagagcagtgtttctctatctggtttaaaagaccagtttttgggtttttgctttttaattgccattccactgtggactaatattttagtaaaaatgaattaccagaaaaatcaaattaaaatttttatttacttatttatttgagatgaagtctcactctttagcccaggctggagtgcattggcatgatcttggctcactgcaacctccaccttctagtttcaagcaattctcatgcctcagcttcctgagtagctgggattagaggtgtgcaccaccacacccagttaatttttgtattttttgtagagacagggtttcgccatgttagccaggctgatctcgaactcctgacctcaagtgatccacccacctcagcctcccaaagtgctgggattacaggcgtgagccaccgtactgggccaaattaaaatgttttaaaarcatactaaatacaagtctggagaaatggccttagatgtcagaacaatgccaagttgctgcaaaagtttcaggatgtttacttctcagtgtctgactttctcattctgaacttgtaactgatgcatggaccacagtctggacaacagacttaggggacgaaggccctcgtgygcctttgccattttcatattctcttctctttctcatggattagaattttatgatccaaccccttcagcaaacaaaagaagagatgaaaaactttattttcttttctttcatagtcattcatttaccagacaatttttgagcacctactatgtgcaagacagggagccacatatggggagactgcagggtacaagagggaaccagccccgccctcctggagcctccagcctaaacagagagcagaggttcaacagtgaatggggttgagtgccaggcaggagaactgcatgctactcggggctgacttaggtcatagaagacctttctagggaaacaacatttgcctgatagagaagagggaggtgtggattccaggcagaggaagcaacatatgcaaaggctttgagtccaaagacatggttgcagtttgtctgtatcatctatttaaaatggacaatgtaggtacccttagaggcagcaayttttgtcttgtatccaaccaagacaaacactctgacattgcttgaggaagtatgtacatttcatcttggattgtgatagtaaaaactggaatcaacctggagttcatcatcagggaactggctgaacaagcagtgatatttccgattctggctttccatcccgtcactaaaacagagtgtctgagcatatggcttgggcagagggagcgaaggagcccaggaaaggcagtgaggtcggaggrgtgggcagagcccatgcagggccttgggggtcactgcagagtttagattttactttaggtgcacagtgaggcagactgtacccaatgcaacgttaacgactcctagtggactgagcaaaaagaaggtgctgtataaatattgcttgttgctgccatcattgttgttactaaagtctggcaccatcgatggcataaaaccccttcacacctgttattgagaagcatcaaggtaaggaaccttgacttcagagttatccgccaattgctagaccccagtccaatggattggcaatctcaattcccacatctttaaaatgaaggaagtaatatatagcctgttttgtgggattgatgtgaggataaaagagatgtgttctttaattacttcattcagagcctttatatgttcattctttcctcttactttaatttcctaacaacccatcatttcacaagaaaggaggcctccaacctggggttgcaggagaaactttccaggtcaccagtcaatgaagcaaaccatctaggactccagcccagatttcctgactcacaatctatctgtttttaccttactaagcattctcttattttacggggttgacaggataagaaggaggaaatttcaatacaaaaaccatcagcagaactagaaatgttcttgaaagaaatgaaattttaaacagcaatgagatactgttctatacccataagatagacagagataagcaatgtttgataacagttgatgtggttgtggagaagcaggactcactcagtgactggagagaatgtcacctacaatctagggagcaccattcagcaacatccaagaagatttaagatgttcttgccctggactcagtgattccagctactgggaatttacctaaaagatagacttgcacatgtgcacaaaatgtgtgtgtgtgtgtgtgtgtgtgtgtgtgtgtgtgtgtgtkgtgtgatgactataagctgcagcaaatacatatgtatatgcatataggtacatctatatgttaaatatattttctgcatgtatatatgtgtgtatatatacacatttgttgcatgtgtgtgtgttatgtgtgtatttgctgcagcttaaattacagtcataaaatctcaaaaccacccaaaagttaatgaataggaaactggttaaatgatgaggaaaccacacattagaatgtcacacagccatcaatacagaataaggaagaactttataagctcatgaagaataatcattaccacatattgtgaagcagtaaaagaaaaagaagaaaatgaagaacagaatttatagaatactcctgtttatattttaaaagatggaatagatatatacgttacatatatatattatatacataagtttgcatatgcacagaacctgtctggaagtgaaytgtgttccataaagctggtaatcgtggttgcctataggcagaagagctggggtttgaggtcagggataggaagagactctttgctttatgccttttgtactattggaattttctacaatgcattcattacattttcagtaaaaattaagtgaatgagctgatgatggttagcctctcctcctcaacacagtccctttctcagccagttgttcatggaattagtacctatgctttaggtaagcatgccgagttttgctgaagcagaaggcagatttgtaactgtggccttgggattagcaggtccccccgtgagattggagrgtgtcttacagttaagtgatatcatctttgcagaggaagggtggttcatttcacacctttgcccaaaatcctaatggacatttaagccatacacagcactactyagtggagtagtgggctgcaggcttgcatacctaccaagctggcaggtagcatgaagctcacggtggcatgtacaaaatatgagaccttcatacctaccaagctggcaggtagcatgaagctggtggcatgtacaaaatatgagaccttcttggcctgcctttcccttccccacttttgatagggtcctaggatgtaccaaaacaaatcacaactgcaatgagaaaatarcacgttaaaaccagcctcaaagtcctgcagatggaatggaatctatsatgacctgggaaacacctgaattgggagcccacaggggcagcttgtggtcacatgggttgcagacatggtgttactagaccatcttgtcattcaaaaagaagccgtaagtccagctttttgtatgaaatatcctgacttttaacaaaatcaactaattcagtttttcttaaaaatatgctggccaagtcaaatgtctataggctcactttggctgacaagccaccagtttgcaactcctcatttggaagctgataaaattrcatgctgtcttgacccagtagctcttttgtgggtgacaaggacgcatcctaatcatgtgtccttggtccttttttttccccctcttccttcaaaggcatcaagacagaagacagcttgaaccattcccctggccagagtggattcctcagctatggctccagcttcagcacctcacccactggacagagcccatacacctaccagatgcacggtcagtgtggcgctgtggccccttcctgcccatctctaaggaccacctaagttgggtgtccattcattcattcattcagcagattttttgagcacctactatgtgccaggctctatctcgaggagtggagaaaatagatacgagatctgcctttcatggtcgttacctggcagtggggagagactaacgataaagtcggcaaataagccagatgatttgggaaggggttgaatgtaataaggcaaataaacctggtctttgcataaagagtgatgagcacttgggaggtcaggaaaggtgagatttgtgactttagatcaaatcaccagggaaggctctttgaagagatgacattgggcagaatcccaaagggtgaggcagagcagccacatagacatcttagggaagagcattccaggcagagggaacagcctgtacaaactgtgcatgcagggaaatgtctggatgtattggaggcacagagctgagaccagtgagactggagcaaagtcagaaggcatgtaggaggagagaatcttggagaaagagcaaggcgcaatcacacatggccttgagggatatgggaaggagtttgcttgtattttaagtgtgatgggacaggcaagtctattgtagagactcagaaatgtcgggtggtggaaatattggacagtcgggtgaagaagctgttattccaggcaggaggatcaaggctctgcagccctagagggtggccttaaggaagaaagaactccattgtgtaaccctccacccacctgccataaggaactggcttactgggttctcccatgctcatctccactcttttaccatccaagaacccttctctgttctggtgcccccttgggagcatgctggagttgatgcatggagcagggggctggtggctgtaattatggggatccccattctgctgtttccctttayataagctgctaaaaattaccatcaagggtctgaaagggtaaaatgataagatggtgggctgatgwgtgattgtacttttttttgagatggagtcttgctatgttgcccagactgggctcaagtgattctgccacctcagcctcctgagtatctaggaccacagctgtgcgctgctgtacccagctttgatagtatttttcttttaaaagcaactacttggaagtactatcacttcatctttattattttaattttttattaaggaagtaataaaaatgattgtcaagggcagcatttcaggaaaaaaaaattgtgaaaggagaataaataatcttaggtatgtgtgtagggaaagcaggtgataagcattcatgcccagccctgagaatagcttcctggtaaggtctgtgtccaagtttgtcagtgatgccatgagccagccttgaccaaacatgctaggtgccaggtgatgctctgtgggttctctcatacaaccttcatgacgctctcaagcaacggtactgtattattcccatttcacagaagaggaaactgaggcatagaaggaatgactgatttgtccaacaccagggcaaggattttagattttattgtaagcataatggcaaagggactgtgtcagatgtcttgggggcctggtggaatcccaacccccagcctcactgcaaagcccatcgctgtaaccccggcactttcctgcctcctctgcttctgctstcacgtctgtgtccccagtcgggcctttctgaggcccactgaagggagtaaactcctgagacccatctctccaagtggggagtgaatgatggcaccggccctgataacaggaggtgtgtgaaggtactgaacttcaacttgtatttgagtccatctcaagccagtttttttccagctctttaaatagaaactggacttactgcctcagggcttctgaggccacagaggttgaaatggagacccggtccccgtatcccattttgacaccccctcagccacacaataagtgatctaagttatgtaggagaggcccccattcattcattcattcattcattccatatgttgagcaccagcttgacacctggcacccttctaggcactgagggcacagcagcacacaaagacaatctcctcatggagaaagatggacagtaatcaattgacaagtagatagataattatagattttgataaagcctgtgacagacaaaaacatggtggcatgctggaccgtgagcagtggtatggaccaggagtggtgatcggcattcagcaggtggtsaggggcctcccgatggaaaggaggctgccacaggaggggccagagctgggccgggccgtacaggcagcgggaacgcaagagcaaaggccccgcggcaggaaaaggctcacagtgttcaaggactccagaggagcctcatcctatcctccccagagcaggatatgcagaataatattctttcttcttacagcaaccgcgtgaggtgggcaccataagccctgctttcatagatggtgaaagtgaggctcagagagggcaagtgacttgcctgaaaccgcagagccaataagtgttcagagctgggattcagactccagtttctctggtgccacttcctctaaatgatgagatttcctggactccttcaggactccaggaactgtcctaatgtctgcacataaacatgcggctyaatctccccagtagccccgtgacatgagcactgccactgccctcatcttacaggtggagaaactgaggcataaaatgtttcagtcacttacccaaggtcacacggccatggcagtgggaaatgagccaggcagtcgcccaggcacataaccctcacgccatcctgcccttcacactctcttagatccatctagaaggtgattctcaggggtgagcctagggccccaccccccacctcaatccccaccagccaacgtctccagctctcttctcgccctaccatgggaatcgtccaggttattttcttatcctcctcacagcccagatgacagaagggcagcggcagcagctgggcttcgtcccaattaactgccttcagtctgatgctaatggctataaactgctcttgagacagcccaggcattttgcaagcctgacatattcctccttaagtatttttttcaaacacaaacacacagaacgctcacacaccatgcccatgtgcttcctattaactttttttttttctgagttgttccagaggagaaataaactctcgaactactgagagcatttcagaatggaagacattggttgagcttagtttctcagaggaagaagaaaataaagaagattgaggcttatgaacttttaggcctgaaaatgctgattttgtgaaattggcccatggtgagaagctagcatgagtctttttcctttctaagaatttaaaccataattttggcccataatcccagcactttgggagaccaaggcaggtatatttattgcttgagtccaggagttcaagaccagcctgggaaacctggtgaaacccatctctacaaaaaaaaaaaaaattatctgggcatggtgatgcatgcctgtagtcccagctactcaatatgttgaggtaggaggatcacttttcagcctgggaggtcaatgctgcagtaagccgtgatcatgccactgcactccagcctgagcaatagagcaagaccctatctttaaaaaaaaaaaaaaaaaatgctgggcatggtggtgtgcacctgtagttccagctactcaggaagctgaggtggaaggattgcttgagcccaggagttcaaggttgcagtgagctatgatcaccccactgcactccagcctgggcaatacagcatgaccctgtctcaaaaaaagaaaaaatatataatttttagaagcaaaaaaggatgctcttggggctcacctcatcattttacagatgagtaaactgaggcactgcaacagagtgtcttacggaagatcacagagcaagctttagacaagccaggatgcctcccactaggtcttctagctaatctcataaacttccaaaaactttagcacagccatcaccccgtaaggccctggtttgagatctgtatctgtttggataacactgcccctccatggaatatacaataaatgtaaaagaaaaaagttcacagctcttgttcagcctttgcagagttgtttattttctttattttaagttcaccctggggtttttatagctgaagtgtgtttcttatgggtttgattttttttctttttggctycttctggtaaaacactgctattcacagaaataaccacaaagattaaaaagagggggaaaaaaatctccagagtgtgttataagaagtttctggtgccacagagttkttaagagttctggacctggcctgtggtcagtcctggcagtaccccacacacaatggcatgagttggggaagcacatggacytctctgtgcctcagtttcctcacctgtgaaactggtatcatagtgagagaggtgacaacatgaggctttgggagactaaataacatgattcatgggcaccacagatgagatccataaaggctagattttctttttattatctctgttattccttccttagcatggtagttaaaaacaactaaaagcagggactctgaagtcaggttgagttaacctccaaatacggctgcaaaccagccctgtgaccttgagctcagttacttctcagtcctccagtttccttccctatgaaatggggacactaagagtactttactcgtggggtgctatgatgactaaatgagttaatgtatgtgaagtgtttagagcgcacctggcacaaactaacgctctctaaacgttaattatcgttattatgattgacattgttagcctcacttcaggtttgatgggccatgttctttccaagttcgcttctatttcctgaactctcaattttagtaagtggtcagggtaagagaaaagaggaatactaatctgagactgtgggactgtctgcatccacataaactccccttccagtgaactctgtgttgtagggagacttaaaaacaggccaagtgcagtggctcatacctataatcccagccctttgggaggctgaggcgggcggatcatctgagctcaggagttcaagaccagcctggccaacatggcaaaaccccatctctacttaaaatacaaaaattagccgggtgtggtggcacacacctgcaattccagctacttgggaggctgaggcaggagaatcgcttgaacccgggtagtggaggttgcagtgagccgagatcacgccactgcactccagtctaggcgacaaagcgagactccatctcaaaaaaaaaaaaaaaaaggcaagaaaacagtgggatccctatccagtggaaactctttttgcatttatgaagggccagggaacataaagactgaagcttagaacccctccagcagccactcaggagcaacatagaatcgtgcaattcagggatgtgtaggaaattaaaagttcagtaaaagcacttgttactcagtgatctcagctcgagacctccgagactggattgtgttggatttagaaagtctctgtgtcagattcatgaaatctaccaccagtaaactgtgtgaccttggacaagtcacaaagccttcatgatctgtgttccacagttctagtgctaacaagagttccaggaaaaaataaaggggttggggcgggtcatggtcatacataccaaatacgtttagtcaatagtgcatgccacaaagttaaaatagacatctttgctacaggacttttcagagcctttgcaggctgttgtgccttgtacttctccaggaatagaattcaggaggcaattttcccaggcagatgggatgagggcccctccgtccaaactcgttctgtggtcactgagaagccctggatgtcatgatcttttaggacccttcctttatgaacgttctttgaatttctattgttttaaacaatgaacatgtatgtttttctttttcctgtgttttaattaaattgtttcttgttgagatggagtctcactttgtcgtccaggctggagtacaatggcatgatctcggcttactgcaacctccgcctcctggattcaagcaattctctagcctcagtctcccaagtagctgggattacaggcgcctgccaccacacctggctaatttttgtatttttagtagagatggggtttcaccacgttggtcaggctggtctcgaactccttacctcaagtgatccgcccacctcagccccccagagtgctgggattacaggcatgagccactgtgctcagccttaatttttaactgagatataactcacatcctaaacttcaccttttttttttttttttttttttgaggcagggtctctgtcacccgggctggagtgcagtggtgcgatgacagctcactgcaacctctgcctcctgggctcaagtgattctcccacctcagccttccgagtagctgggactagcaggtgcctgccaccatgcccagctaattttgtttattttttgtagagacggggtttcattgtgttgcataggctggtaaacttcacctttttaaagtgttcagtttagtgtttttagtatattcactaaaattgtgcaaccatcaccactatctaatgccacagcatttttgtcaccccgcaaagaaaccccatgtccattagcgtcactccttagttcccctccctccgatatattccttttgtaataaaaaaaaaagacacatgaattttttaaacaggttacacatttacctagttcgggcatctgtggaaatctttcttctaccctcatgctacatccaccccgtttccaaacccctaacaattaaccactgtaataatttcgtgggaacccacccagaacatctttttgcaaacataagtaaaatataagcagtctattatattgtatgttactattacaagaattagttcagacgtgattcataaataagaaaactatgttagtataactcggaagttgcattgtttcatttgcttctaagggtttctctatcactgttgttgttgttacgtgccttgatgtagttttctttatgattctcgtgctctgtgttcattgagactcttagatctgtggrtttatcatttccatcaaatttggaaatttttcagccaatatttcttcaaatttttgtctgatgttccacaccactacctcccactccaagttcataaatcttttcttctgtagtatctgatctgctgctaattacatccatgtcatttttcatcccatacatcattttcatctccagaagtttgattttgggtgtttttttttkktttktttttttttttgaagacagagccttgctctgtcacccaggctggagtgcagtggcgtaatctcggctcattgcaacctctgcctccagggttcaagcgattcttatgcctcagccacctgagtagctgggcttacaggtgctcaccaccactcctggctaatttttgtatattaagtggagatggggttttgccatgttggccaggctggtctcaagctcctgagctcaggcagtctgcccacctcagcctcccraagtgctagtacaggcatgagccaccatgcccagcctgggtctttttctgataacttccatgtctctacttaacatgtccaatctttcttctggcttcttgaacagatagaatccagttgtagtaaacgttttaatgtccgtgtctaattctatcattcctgtcatttctgggttcattttcattgatttttctccatgtcgaaaatcatatttttctgcttccctgcatgcctgataagtttcaattggatgccaaacataaattttaccttgtcagatgctggatatttttatattcctataaatacttttgagctttgttctgggatgcagttaggttacttagaaactgttgaatgcttttgagtcttgctttcagccttgccagttgggatcagagcagtgtttggtccaggagaaatttttcccactactgaggcaaacccttctgagtattctacccaatgccccatgaattgtgaggttctgcaattctggcaggtgggaacaggaactattcccagctccattatgagctctgaagcttgttgcttctgatcttttccagtggttctctctcagccctgggtagtttcsttacacccatgtgctcatcagttctcaggtggccactcaaggggaactgtgagcaaacctccagagcgctcccagcrcaactttctttttctgggagttctgctctgccaattccagccacattagcctccgctgacttgcagctccatctccccagctcagagagaccacgggcctccacctgggttttcccttcttggaaactctatcctggggcaatcatacagctcaccatctgtttctcctcttgcaaggatcactgtccatgcctraggcccaatgtcttggaaacctagttttcaaactgtttcagctgggagggtaaatccagaccttgttactcagtcttggccagaagtgaaaattccactgcattggttcatttgtaatttttccagagcatgggctaacagcagctgaatgtaaaataccaaacacaagcaaatgcagcaagcctggtatgagtacagttctgctcagaatgccctatcttcttcctcttcctcagtttggttacatgttctattttgggagaactaattttgcaattcctgccaatttttatgcattttgcccttgtttccataattcagcacctccatcatctcttcatcacctccatcaagatactttcacttccttttaaaagcaaagatctctatttaatgtaatgcttctcagtttattatttacatttttattttttcaccatgctatcatttttactgggattgtcactgctttggttaatgctctggttacaaagtggcattgctgtggggcagtcagctgtaaccctacttcttcccataagctctctgattttagtgcacrggtttgcataactcatggcctttcaagaaagcattatcacatgatggcagaaacacttgtctatattcttttcacagataacatmctatgcacactcttctgcacttcgttttcctcatttagctatataccttggaaagaacttgctaagtcaatatatagaaagagcttcttcattctttttcatagatgcctattattgcattgaatgatgtgctataaatgattgagccagttccttactgggggccatttggcctgtttctactcttttgcaactgcctccgaaatggtcatgaaaacccctatatgtatattattttttataagtatatctgaagggcaaatttccaaaaagtaggagttggggtcaaggggcaagtctatatttaaatttggtagatatcttcaagttaccctccatagggattctacccatttacactccccccagcagtgtctgggagtagtacctgttttcacaaaaactcatcgacccagtgtcatcttacggttgaagtttttgccaatctgatgcrtgaagaaatggtgtctcagggcagtagtaatttctaagtcttgtcccacaagtgaggttgagcatcttttcagacccttgactgatttgtatttcctttcctgtgaaccaggagatttgacttttaaaagtttgcaaaagaaaagcaattaagtactaggcataccaatatttaagcatatcataaagcttcaataatcaaagcaacatgcttctagtgtgaatacactcaccgatcaatagaggagaacaaatggtctcagagagagacccacacatttagtacrtggagaaggtgatgtcttgagtcagtgggaaaatatgaactattgaatgaatggcattggaacagctagttagccatctggagaaaagtatccattcctactaccagaaaacaaatccaaatggattgacggtttaaatgttaaaaataaaaccataaaaatactagaacgagaataagcacaattttttataaccttggagtggaaaaggcttttctaaccaggactcagaaatccaaaatccataaatgaaaagattgacaggttcaactacagaattttttttttcttttttggcacggcaaagaacaccagaagtcaaaacaacgaaacaaatgacaaaaaacaagcaaacaaacaaaaaaaaagaaaacaaaatgacaaactgaaaagaaatatttacatctgaaatcacaaagaaatgttactttttcaaaaatgattctactagtctatggattgaacctgctccaggatgtggttcttctcaatcaggatttcagactcaaatagtacagggccgagcagtaatgtaaaagagagacatgagctagatatagggttatagggagtggtgggaactgtagcaaactagagactaaaccccccaccaacgctggggatagtggggtgttacttggcttcagcccattgctgcccctctagaatggatcccaaggagaccacatctttccatttttcaaagtgatccctaaaactctatttaatgtgaaatctccttattctttttcaatatggacaattgatatacactctctttgaaacaccttgtgaagcatacaaacacgtataaggctggcttcatgcccacatcttgcagtcttgctccatattttcttaactgaaccacaggtcccgagatgactagatggggcaaatcacaagctaagtggtgacttggggaaccacacagatcacctcctttgggttcccccacctctggcttatttcatcagtgaggtatgtttcagagaacttgagtgataggtgtggccatagttgagagtggagcccagtggcctcctcatggtgaratggagtcatttccctatttctctccggtgatggcatctttcaggctgtcccagcccagccagttttgagcagtctaaatcttcctgatctcactgcatcggtcaagacaggagccagtcttggcatcctatgggttgttggactgaggccgagttycctaatgtgaatcagcaactcttctgcacacaatgaagtgggtgargtttccccatgcatgtcagcattctcgcccctgtgcaacacctccagcctggggggtcactctcccctccccttcatgtgtgctggcaggcttgctgccttttgcttgagctaaagtcttctgaatttagaacgtatagagtttaaatggagggtctttcctctagttacataacaagttagatttggtcacccctatctccaaaagccactggaggtaacaggcggaaacagctggagagattgagaatgagtttgggatcaggagggagtttagttcaacagcaatttgctaaggcagtgctgtccaacagacccttctgtgatgatggaaatcctctgagtggctgtgcaacgtgatagcccctagccacaggtggctactgagcactgaaatgtggttagtgcaactgaggaattgaatttttaattttgtttaattttaattaattgtaaatgcacctactctattgggcagcacaggtctaagcaatgtttcaaagctaactcttaagttgtgttatggactgaattgtttcccgcccctaaaattcatatgttgaagctgttacctccaatgtgatgggttttggtgatgaggcctttgggaggtgttagggttaaatgaggtcatgagggtggggtcttcagaatgggattgctgttcttataaaaagaaagagagagagagatctcgacctccttgtctctccctgaatgcacatactgaggacaggccgtgcaaggacacagtgagaaggtgaccatatgcaagccaggaagaagaccttcaccaggaatccaaccagctggcacgttgaccttggacttcttggactccagaactatgagaaataaatgtctgctgtttaagccacctaggtgacagcattctgtgacagcagcctgcactaagacagtaggtttttcctagacatgcaaaagcagaaatggaaaagctaatatcctgagcattttgtttgtttctcttttgaagatgcttcaccttcttctcttcttgcccccactatcagacggattttcaaagcaaagcaggtctacgtgtggcatcaggagctggtgagtgacagaagctggtgccttcatatagccgtcatcccagtagatattaagggagcatctcctctgtgccaggcactgtgccaggtgctgagaaagcagaggtgagcaagacaaatacagtccctgcccccctggagttcacaccagggatgagagatggacaataatccaatgatggcacaacacatgtaaaattgtacctgtaaagctctaggacacagggccaagacagagtctgcaactgtctggctccaagcctgtgctcttcactctgccactggtcacagatccagatgcctcatgagccagcccacaaggtcagtgtgtgaagatggctgggtggccctgtggcaaactaaggagccccagccctatataccggggtagccccaccccattaaagctggttattgcgatgccatagattattcaaaatttaaattaaaaaaaaacaaatgccagaaaycttttataagaaatttcccaattaaaaagacttaaattggtagcaacaaatttttaaaataaaataaaacttactgtgcaagccaaagcacatgtacagattggattcagcccacaggctgccattttgctaactgtgttctctatcatgaccatggagagaactgatgtgaaggcaggggactctgagctcagaaggggaagaaatgggggttagcatattcaggacagggtgtaagaaggcagaagggccacaggttatggatgtgtcctgtctcagccacatcagctggaagaataatgatggcgtggtttctagaattaagagttgaagttgaacaagggctcagcccatagaaggagcttatcgaagacatgctgtggcaactttgcctggccaccctgtagctcgccagttactttgatgggcagccatggcttttatccatattttcagggcagaagacaggtggaaccagaatgatgccataatggttgtaaccagtgggtggccaatttggggttgacataactgtatctgcaggggaagcatgatcaggtccttcttcatatttaaggcttacctactccttttaccccttcctctataagtagcactgctgtctcttacatccttttcctcatacctcccattcattctgtctacaaggttactaacttccttattctctatacttaacacatctttacattttgcccatatcacccaagctccttgcctactcactaagtttttataacacttcttccragtttcattcaccccatctctttttcttttttctacaacacataattgaacatcgttaaatattcaattaagaattaytgaacacagtacagttacaattgaacatattacaatagcattcttacaaagttctatgtatgttaaagccctgaaaaaaaattctgcttgtaaaatggactgatgtgttggaacagaggtgagcaaactttctgtaaaagagccagagagtaaatattttagattttgagggtcataggtctctgtcccagttactcgtaactctgtcattgtagattgaaaacagccatagtcagtacgacaacgaatgggcaaggctgtcttccaagacagtgttatttacaaaagcaggtggtgggttggatttggctgagctctgtgttctagggtcatattattaaaaccagatcttatctgcctgaatgtttggttggatatttgaaagtcaggtgggacctgggaatggtcttccttttgctggactctccacacattgcagaatgtctgcacctctgtcacctgcccactaaatgccactagttcctccaataaaagtgtccccatgaatttccaggcaccccctaggggtactgcagccacccaaccactggtttacacagtggcaggttcaggcatggggagaggtggctgtggtgtaggaatgaacatctgtcattcactcagcaaacattcaccagcgtaggctctgttgcaggcagcatgctaagcatgggccacrcagccccaggctgacagtcaagccacaccttcatggaattyatatcccagggagaggatacaggcggtgcatgagtctagttaacctgccataacaaaataccatggtcttggtggcctagacaacagaactttattttctcacagctctgggagctagaagtcccagatggaggtgccagcagattctcttccttgtgagggcttgcttgtatatgctcgctctgtgaacacatggcctctcctctttgggttcacaagagagagaaatctccggtgtctcctttttttgaaagacagggtcttgctctatagcccagactgkagtgcagtggtgcaatcgtagtcactataacctcgaatgcctggactcaagcgatcctctcgtctcagcctcctgagtagctgagactacaggtgcacaccagsctgctgctgcttataaagacaccagttattaccttgtaactcttatgacctcatttaatcttcattactactctggaggccctgtttccaaatacagtcacattgggggttacagcttcaacataacgaatctgggggccacaattcagttgcaacacgcagtgggtaaggaaatgagcaaatgacaagatgatgtcaactgtgatgagtgctccaaggagaataaacagggagatgtaacaaagagaaaccaggaaggacgccaggctctctgaggaagtgacagtggagctggcacttgcaaattcggaagagccagccrtgggtcacaagtgtcgccagcagataggaggccaagtggctgaggagccaaggggagaggggtggggaatgagttggccggtgctcaggcaccgggaagccatggggttctaaaacagggcaggtgatctggtttgcatctcagaaagaccagttgactgctgggatgagtggactatggggggatggcaagggctgcaaggaggccaggagggagttctgtcctgagacagtgcctgacctgtccctagctctcccttcccctccgcttctctaggtcagacacagtgaagccagtattcacaagtgtacctgtgacaatgcctgccagatctcagtgaccccattcagaaaattctagaattattacaacttatccttttactcccagaggaatgaaggcccagagcacggctttgatgamgttgcttttgtgtcacttgtttcttatttcatttgtttatcatttttatttctgacgtttcgatgaaatgagaactgggcccacaaccaaggtctgcacctgcacaatttgttgaaaagtcatagatgaaatctctctgccatctgatcattggcaggggcaggggtgggggaaggggagtggaatgagaaaaaggaaaaaaaatgcaccaaattttaaaaaccagtacaaacacacaaaaaatgcagagtcctatccaaggaacaagtccctgccctgctaattccttagagataaaaggagagcagcctgctcccagcccaggcagcccagccttctgttcaggaattgaaaggggtaattaaggggtaggggaaatacagcctcaggcagggagccatttattagagaggcacagacagacacacagaccctgcaactcctcagttcagagaggaggcacagccaggacagaagccaggctgtgggatgctcagtatgtacccttaaagcaaaccagatttttgctgctcctaaaagttcaggtggtaaagcggggaccagagtccagattccacccacctttgagttatgtgcttctttccctgggcccggggaacatgcagggaattcctgatttttgtattatttcccattcagtagctttacacatgtcccaggaaggcagcttagccccctagtcctgaatccacctgccttcttacactgctttttatttttcatacatttattttaaaccacatcagtgctattagtgtgtatctttccagaacattctctatgtatgcatttacgagcttatttttcttctcaccagtagaaaatcctgtttttttaaacacaagtaatatcttggtgtgcatcttgttttataagttgtcttttatatttttcgccaattaacatgtctcggagatctctcaaagtcggttcaaacaaacccactttagtctcttgtttggcctctgcagacgctgcagtactgcatcgagaaagccagatgcyggggttgaatctccgcctctgcactcactggctgtgagacttgattttctcatctgtgaaatggggtttataggagtagcttttgtgaagcctgggacaaagtcaagtgcttccttgctttggctatcatggttagtgttatggatataccacggcatttagccattccccttgaaatggacaaaacttcccacatttcactgttttcacagagaagcctgcaatcttgaattttggttgctgcagccatttgctgtccccgtatgtgtctccctttgtggcaaccagggcccccttccaattcccgcagcaggcctcgccaggtctcgccacactttgcatctctgctactccagccctaaactgcagcctgtaagaactggcagctcaaaaagattgtgcaacccccaagaccatagctcagggccatcccagctgctgctgcaggtgagccctagccggctgcctgacctttaggtcagtggagtatttttgatcgcttaggagcaagagaagagagccaagaggaggcaaataccgaagcctrctagagacaacccaggatcccagaagtgtatttctagaaggggtgatagagatcatctaggtcaggggtcagtccaaataggaaaaacttcaggctttgcaggctatacagtctctgttgcaactgctcaactctgccaatgcactgtgaacattgttatagatgacacataaacaaatggcatggctgtgttccaataaaactttatttacaaaaacaggtgaccagcccacagaccatagtttgccaactcctgatatgagttggtctaagtcaatccatcccggggcctgggtgagttgctatggctgcctttagtgctgttcctgacactgaatcatacacaatgacccagagtggcaggactgtatttcttgcccttcttgcaggcaaggtgtcggggagaggcagtcagctaattctagccactgaactgagagtggaaatgatcatgtcatgcctaggccagagcattcaatggccaatacaagactctgccagtgttcaaattgaaggctgctcctttaactggtgcccttgagtgactccagtgaacatagtccctgatgattctcaatggacatatagcatgaaagatagatcaactttgattgcattcaagccagtgggatactggggatgtttgttaccacatcataccataacctctcctgactaatttattggcacaagagattattttacatggaacatgaaagtggcactcaaagtcattgggtcacatagtgaggaagtcattcccctttctgtcatctttcagcccttctgattcagtgataaagggaggaaggaagtctctatttgatgctgatatatcttcaatgtgtctctaatccctgcaaatatttctttttaacaagatgagagcaaaccctaggtttaaggtctttggcagacaacagtatttggctagaattaaaaacatttgttccctatgtattttttgtgttttgtatttatcattaatggcaagtggtattgattttctatttacagtaataatataaagtcttctcagacaaatttatttaagtaaaaacagtgaatgattatacggatagggcttaggacacaggtaagtttcgcaaaaatgtgagtcaacattaagctgatataagggaaatattaaataaaagaataggccaggtagtttgaggatatttaaaaactgtgtgggggcagggagatgagtagagtctggatgcaggaatcttgttcaatatcttccttgcataagtgcgcaagtggaggcttagagaggggatgtgctttgctgtgggtgaaccagcttcccaggaccaaggcgaggagggatccccaactttgcaattcagaggccaggctatccttgtgcccgaggccctgtccccaccaaagttaaaaggaaaactgaggaatgccagtaagtcaacagaattgcctggatgtgtttcctaagactgtcataacaaagcaccacartctgggtcactttgaagaatataagtttattgtctcacagttctggaggatagaagtctgaaatcaaggcattggcaaggttggtaccttctggaagctcagagggagactgtcccatgcctctctcctggcttctggtggtggcaggcattccttggcaatccttggcctatagatgcttcacaccaatctctgcccccatcaccacatggcattctctctgtgtgtctgggtccaaatttccttcttcttatgaagacaccctaatccattatgacctcatcttaatttgattacatctgcaaaagacactgtttccaaataagatcacatttacagctactgggccttaggagatgaacatagcctttcaagggacgcaactctacccacgacatcacccaaccagggtccctggctgagctgcaagaggcttggagccaagaactgcgtcctgtccctgagctggctgggcttagcaaaaattgaaaccaccctagtgaaagaggtcggtcaaggatcctgctgctcagctggcttgtattagtctcagtctgagacggtggcggcaaagatggtctaggccccagcaagtgaggcagcaagaggccaatgccagcaaaggtcagggctccctctttaagtataaatagaaccttcttcccagccaccccctcccatagccacacaatatctctttcaaagatctcaaaacactgaagcagaccgtaccaaattgactttattgttttaaaaccagccccttctgtctgccaccacccgccaccccttcccgaaggggaagaaaaaaatcataatagatgtctctccagcgtgcacctctgttctcctctctctaatggcagcttgggaccctgaggcagtgacgcttagtaatgtatcctaatagtcagtgtttgtctgacaaatacctagtgaccacaagcctaatcagggccgccatgaattaatggtcagtgtagtgatgggtgctgaatgatcataaaaatagctaatactgggccgggcttggtggctgatacctgtaactttgggaaacggaggcaggaggactccttgagactagaagttcgagaccagcctgagcaacatggcaaaaccccgtctctgaaaaaaaaaaagaaaaagggggccatgtgtggtggcgtgcacctgtggtcttagctacttgggaggctgaggtgggagaatcacttgagcctgggcagtcgaggctgcagtgagctgtgattgtgccactgcactccagcctgggtgacagagtaagaccctatttcaaaagaaagaaaaaacaatgctcacgctgaatgagggcttctggggaccacggaccaggctgagcacttggccagtattcactcccttggtcaccacttcagtgtttgcagcaagttgttgccatttgacagatgagaaaactgagactccaagggaggaagcgagaaagctgggaggtggcgtaaccgggatcagggccgggactagcatgaagtaagagaggcactggctccatgtgcaaaatgtaacagagtgccaggaaattcaatcatggataactattttaaggcactatttaaaatagccaaagttcgcgcaaaaactccctgatgaacaaagtatcaaattttgaaataaagacagactcctgctgtttgtttagtgacccagcaatattgtggaacaggaatggtcgtttccaatcagcccagggttctggtgcatacgggcattatggtcctgccgtggcagggctaggagggtaagcagacagatttggcaatacagggactgttataaagtcatgcttyttgataatagtgtttttaacttcttccacttgcttcgtaatattggaggatattttgggaaatgcatataagagcatgtatttttccttttgcctcaggcttcagtacagcttggttcagtgccaatcaggacacttctccaggcagccggaatccaaagttcttgctttatttatttccttccttccagtaggttctacagttttgcacacaccacctatgtcacctgcataaccaagtacaggggttcagaatgtggccactgaactcagatcgcctaaattcaaatcccagttctgccagttatcaactatgtgacaggcaaggggctttgtttttctggacctctgtttccacattggtaagatacaaatgatgggtgtattagtttgttttcacactgctataaataactgaccgagactgggtaatgtataaaggaaagagtttttattgactcatagtttaacatggctggggaggcttcaggaaacttacaatgatggtggaaggtaaaggggaagcaaagcaccttcttcataaggtggcaggaaggagaagtgccaagagaagcaaggaggagccctttataaaaccatcagatctcatgagaactcgctcactatcatgagaacagtatgggggaaaccacccccatggctcaattacctccwccaagtctctcccttgacacctggggattatggggattgaggattataattcaagatgagatttgggtggggacacaaagcctaaccatatcagtgggaattcccctactcatcagcaggttgttgtagtgattaaatgagtcaaaactcatgcaacactgagaatagacatggcgcaaaagaagcactccrtgttcaytggcattattacgtgttgcattgttatgtgttgcattgtattattagttttccatgacttctataacaaattaccacaaacttcgtggcttaaaayaacatraatttgttatcttaccattttggatgtcagaagtcttactgggctaaaatcaaggcatcagcagagcttctggagcctctaggggagcatctgttcccttgccttttccaacctcccaaggctgccactagtccttggcttgtagccccttcctcaagccagctacagtgggttgatcttctgtagtcccatctctctgactctttctgctgcctttctctgccacttttgaggaccctggtgattaaattaggccctctcaggtaatccaggatcacctcccgatcttaagctcagctgcttagcaaccttaattccatctgaaaccctaatttccctttgccacacatgtaacctaaatatccacaagtcctgggattcgtattggatatcttggtgggtaggggcatttgttctctctaccacacgtgttcatcattcaacaagtatttattcacagcatctgctgtgcagcagaattaggatttacagcagtgacaaaacagataaaaactgcccttgcagggtttacattctaacagggagaggtagatgtatatatatttttaattttaagtaaaattcatagtgtttctgatggtgatggattcatgtagaaaaaataatagagcaagggagagaattaggaagctgatgattttaggtaggggtggggcggtcagggaaaaaagtcaactactggctgggctcagtggctcatacctgtaatcccagcactttgggagaccaagctgggaggatcacttgaacccaggagttcgagaccagcctgggcaacatggcaagaccccgtctctacaaaaattagccaggcatggtggcatgtacctatagtcccagctactcaggaggctaaggtgggaggattgcttgagcccaggagattgaggctgcaatgaactgtaatcgcaccatggcactccagcctgggtgatagagtgagaccttgtctcaaataaataaaaatataaatataaactactgcttctgcccacaagggtgctctggggacaggtccacatagggcagaggaaaccctgaggggtctgtgtgtgtgtgtgcacgcacacatacacaatgttcattgtgatataaaatttaccatcttaaccatttttaattatacagtaaggagtgtgaactgtatgcaccactttgtgcaacagatttctggaacttttccatcttgccaaactgaaactatatccattgaacaactagtccccgttccccgcacgyagcccctggcagccaccgaggacttcctgtttctaagagtgtgagtactttagatacctcacgtaagtggaatcgtacagtatttgtctcstgaggggcttttgtgaagagagtaggggcttctcgaacaggagaaaaacaaacaaaaaaacattgatctttttcacagctactgggccttaggagatgaacttagccttttaggggatgcaactctacccacgacatcacccagcctgggtccctggctgagccgcaagaggcttggggccaagaactgtgtcctgtccctgaaatggctgggcttagcaaaaaaccagagcagatgtcgaaatcacacacacacacacacacrcrcgcacaattctataatgtgagtttctaactrttttgacctagaccaggtgtaggctaactaaaaccctcaggccaaatctgcctgctgtctgtttttgtaccacccatgagcttaaaatgggttttacattttcagatggttgaggaaaagaatcaaaagaagaataatatttcatggcacatgaaaatgatatgaaattcaaatttcagtgtctactaataaagttttattggcacacggccacatccattcattatgtctattgtctgtggctactttcctatcacaaaggcagaactgggtcattgcaaccagagaccatatggccaaagtagaaaatatttaccgtctgtccctttacagaaaatgttttcccgtcccctgatctagacccacagaaagaaatgcgttttatattttaaccctgagctggcacttgggcatgcatatacctacaatggaaacaaagtatcaacaaaatcacaccctcactgcctgagatcagtgcagtattctcaattctcttttttctattcctgaggcggggcatcttgtagtgataaaagacacagattgtggagccagcctgcctgggttcaaatcctggttttgctgttaactgtgtgactgtgggatattttttcgtttctctgtttcccagcttcttcatctcatagggtcattgtgaagatcaaatacttttttttttttttttttttttttttgagatggagtcttgctccgtcacccaggctggagtgcaatggtgcgatctcagctcactgcaacctccgcctcccaggttcaagcggttctcctgcctcagcctcccgagtagctgggattacaggcgcccgccaccacacccagctaatttttgtgtttttagtagagacggggtttcaccatgttggccaggctggtctcgaactcctgacctcaggtgacccacccacctcggccacccaaagtgctgggattacaggcatgagccaccgcacctggcaaagatcaaatacttaatagaggcaatgtttagccatgcttggtgagactgcacccagtaagtgtttgccattttaagcacagaaggccatcttttctacagtattggttctatctgctaaattcatttcatacacactagcaggtcttacccagtttgcaaatactgttccrtaaagaagtgggaacggtcttggcagtctttgaagaatggtatgttccacttagagcctgtctccgtatctccctcaatgggggatcttgggcaagctccttccacagtctgagcctcagttttctggtctgtcgaaggggaattgctgtacctctcctgtaaagccaaacwgaggactagtgagaaaacgccgagttggggctcagcacggggccagccctcagggacattcagcactgttttcattatttcctgttctgttacacgctctgctgttacacaaggaaaataacaaccatacagcagcaactgttctaatcacatcacacgcatagctcctttaatcacagccacacaacaggtagggactgaaacacagagacatcaagcaagttgcttgaggtcacacaggtaagaagcttgggtctcagctcagcctttctggctgaaagtcaatgctgttatcacwgtaactacactagaacttgtcttgaackgtccctagaaatgggagtgtctgggggttaggggggaggttaaaaaaccaaaacctgtaaaccactgtgacttagggcttatgtagccagcatcttatcactggacagcacatgttctgagggcatgccaagggtttcacagaacacgtgaggctccactgtgtgctcacagctgcagggggccagaagcaccctgtggggtcccagcaggtaaggagcttaggcctggctggaggataaaccaccctccacagggaagttagataaccagcaggtgggtgcagcccccaggtccctgctcctcctgccagcccgctgaagcagtcccgcccctgcgagttagaattctacagaaaaatctgatttctgttctctagtgtttaaagaaccctctgatcctaaggaaatctaaaaactttggcaactggcaactccaacctgccagaaaagcctccctccccatgctctttcctttaatttatcttatgttattttgaatagtgaatacctgcacatagtacagaggtagcagttaagtctgcctcccacttttaacccatagccatccagatctcttccccagaagcagcccccatcaccagtttcttctgtgtccttcaagagatagtctgtgcacgactaagcatacatgtatattgaacacttttatacagatggtaaaaacctaaccctaaacctaccaggactcataagcttgtagcaactgccaacggtytgttctggtctgctctttttatcactgagttgcagtgccaggttctgaattctgtctgagagaactggaccaatcaaggaagccactggcaaatttcattcaatgaacatcttgttggactcggtaggaaggtgtgcagggatcaattagtgatgcctgccatgaccacgggaggggagttttaggataggtgctcagattgttctccctcagtctagtaaatgtttcctgtactttgaatatattatacatggctttgtcacatcaaaattccacctccactattatttgattttttttttaatttacagacttcttttggttcaaaagtaaattcattttaaaagccaaatttatagcactaccttaaatggaaagccagttttgtttgccataaatggaaggtttggtaagaataaattcactaaaaataaaattataaaataaatataaaataaaattggtaagaatatattcactaaaagttaaattatagccaagtatccaaatctgaagacacaaagagattagcgagtgtgaaagatgttctccttaacccaggaataattaatactaatgtaatactcagttccaggtgctccctcattaattgcttacaactaccatataaagtagaaattattatcacgtctattttatagaggaggaaactgaggcatggcaagggtcagtgataggtgcaatgtcactcagctaatgagtggtaaagccaggagttggacccaagccgtctaactccagactccaagctcttcacttctgagctaggctgcctattagatcgattaaaagaaattaaaagggaagtcatctaaaattatcttttgtatcatcactggtggtttctgtcacactttggcagccctagattggtagaaagagccaaactggacttaaggcttaagtctgggttctaaccctgtctttgttacaaattcatatatgaccctggtcattcagcctctgaccctccacttccccatctgtgaagtacaggagttaggctgtatttgagcttccagatggcgggaaccatcccttatctcaaagaacccacagcacctggcacgcattatcagttagagttcattcagccaccagcaacagagaaccgagtgtcccagcttccctctgtcggtctaccctgctatacttggacttagctttttcatccttatgcctcttatcacctcatggtcacaagacagctgcttcacctccagccgtcacctccacattacaggaaggcagaagagaaaagcaagaaggagcaatgccacaatcaggaaagccgaagttttcaggttttgctttaatggctggatttgtgttatatggccactcttggctgcaagggagatagagaagtgatcatttttacctgggtacattgccgctccagttggattttcttaacaagaaaggagaggaagcagatattgagtaggcacccattaggcgactgtaaatacttaaagaaggaaaggcgagagggaggaaggggaggattaatccttcagaccccttccagctctatagagctgtgataaaagaatgttcatcctgctgtcttacagagctctgggcccaaaagtatgaatgttatatttttccttaaaagggtttttctgtgaacttctgcatgttgaggccacttttgtttttattggcaaacttattccaggggaatgagagttcatcacagtacagatgtatatttaagtaggacaggaggcacaggcaggggacccacggaaagggaatgttttaaaagggagaggccaacattcaggctgggaagagtacacaggagtctcaggaaggaggtgtcaggtgccttccaacacagccaaggactggaagtagccctgaagccagtcctgcttctccctggctgcccgtggtcatgggtgcaggccgcattcttttgtgaggcctctcagcatcctttctgcagtgctgtcttcagaaggtggtgtttatcctttcatttatgacctggcctgactttgcactttttcctgtcactttctagctgggtagccttggacaagtttcttaacctctctgttccacagtatctttgtctataaaatgggctgatgataatacgcatttcatagaactgttgtgaggattaaataagttaatacgtataaagctcacagaaactttcctgacacataataagttctcaatcttaccacaccatcatcattattgccattatcatcattgtcctgtctgagtgggtcaatagaagctgacaccttcccaatcaatgttgagcagtttttgagtagttctttcacttttttagtgatcaagaggatattgataggatatagatattgatagttcaacattacgaggtgtttggatccaaacaaagttgtccaggttgtccagtaatagactatccttttaaccacagacttaaatctgtgtttttggagacagggcactaggaaagtgttcatagggcatgctggtwtggacaaagttggatactgttaatcagcacagcccttcccactggagctctgcttttgattttacacaactccagggggcaccattcacatcaaagtcatcatagactcagtcatcagaccattttcaacatawggcgttaaggtgtcttgagaaagtgagaggcctttttctagcggggctgctttccatatgctctggtccacccttccaagaaccacagatagcccatgaacccttcttagacttaytcattcattcagcatatgttgggtgacacccactgtgtgccaggcattgttccaggcactagagatgcatcygtggacaaagtagacaacagtcaatactcacagtgagaaagacagacaaaaatcaatatttgtaatagaataaataagtacattgtattgtagggtgagaaacgctatgaatgaggaacaaagtagagtctttcgggggggtgggggcaatagcaagttgcactgttcaaccaggtggtcaggctgggtckcactaagaagttggcgttgagcacatggttcattcagcgatcacatttttgtagaacgctgttcattttttaattccttcactcagcaaacatttattgagggcatgccaagtgcttaactaacattctctcatttcatctcacaaaaatcctatctataattactgatatttctcccattttgtaaatgagaaatttgagtcacagggaggcagagtgacttgctcaaggtcatacaatcggagaacagcagaacctagttctaaatccaggactgagacactgccaaggaagcataaatacactgcttctcactgtactcatctagagagrgaaaacaatactaaacagatcatcatgtacctaattayatcattgcaattgtggtaattgctatgaaggaagagtacarggggctttgaggaactgtaactgggcctggggaaatactaagcccagtgtatggactggtgattgctgtgtaacaaaacaccccaaaatgcagtggcttaaaacagcaataatggatcatttctcgtaatgtcttggattggctgggctcagctaggtggttttccactcttcctggtgatacttggggccacacataacagctgcattcagctgagatgcccaagaaagctatccccattcatctggcagctggtgctactataggctggggcaccttggttctcttccacatggactctcttcctccagatatccaaccagcttcctcatagcatagtactgggttctaaggaaaagaaggtggaaactgccagctattttaaggcccggactcagaagtcccagaacatcatttctgccacatgctgttggtcagagcaagtcacaaggccagcccatattcaaggagaggggaagatgtgggaacagtatacacatacagggatcagaagagttcttgacagccatatttgaaggtcagcctaccacatcctgtccttaaaatgtctcacaagtttctagagtaactggrgcacagtgcttccatggatttgttaccktgaagacgttctgcctgaagctgcccctgtcttcttcctcaactcttttcatatccgtctacatgagcaatggaattgctatggaaccaagagaacttttgtcaggaatttgcaggggcctgtttttgagaatttttttcagcatcaatggtatatgcgggyttgggagtagtgttagggtatatttccagcttctataacaaagatcaaaactaacaatggtttgatgaagtagcggtttatttctctcttatgtaacagttgggtgttacagaggagacccagactcttctcatcttgctgttccacaagtctgtgttgctgtcctcttctatacgacagctaacatcttaaggctaacgtctaagtccatttgggctgctataacaaacagaatatcatagactgggtagcttataaacaacagacatttacttctaacagttctagggactgggaagtccaagatcagggtgccagcatggtcaggttcaggtggggactctcttcctggttcatagaccactaactatctttttgttgtgtccttacatggcagaaagaagagagctttctggggcttcttttataaggggcttcttttataatcaccttcatgagggctcgactttcatgaccaaatcacctcccaaaggtctcacctccaaatactttcatgttaggaattagctttcaacatgtgaattttggagggacacagctaaaacttgtgagcttgatcactgtgagacagaaggaaagaatggacattgtgggcagttaccagcctctaccactcatggctagtgggggaaccagcatgtagatacaccgaaggatgaaggtgtctgcatctctcatcatctctgcacagagcagtgtcagctgtgggctgcccaccagaattcccagccctcatcctaaaacaacagccctcccttggtacaaacatccagtgagtgagctttgatgggaggcttgtgtaggggggtgggctgggtccaagccctcctagccaagcgtgtatggatttcatgctaatctgcctttctggactagtccattcatctattcaaaatgtgtcgccaggtggctgcgaccacgaagggtccaaactagggccagttctggaccaggtttgacactgtaaaatatgactgttaaggtgagttcaagagttcagcagcttggtgaactcttgtgtatctatctgggaagggttctgacagatctcagctgcctcatggaacaagcacaactcttactgcagacagcttaccacttagctgggcaaccttagacatgttacttaacttctttaagcttcaatgtccttatttttaagattgtcaggctggggtatgatatctgtctcccctgggttattgtgaagacaaaaataagatcagattagggcaacttgctcattttctaaaatgtatcgtgtacatttctcaaagaatgattttttttctcttttcaaagtttaaatgttgtagtgcatccccatgaatatccacttacgctgtaggatcctgaaggtcgggggctgtgtcttattcccctctgcatccctcagtgagtaattctgggcctgggagtgagcagttccccattaaacgtgggcatgcatgaatgagtgcgtggatgatctgagactcctaggcgaggggcagcaaacacaaatgcccacaggagtagggcaggtcacgcagaggagtaaagtgggctaagcctaagaaaaaagatgagcaggcactgctttattttttgtctctctctctcttttttttgagacaaagtctcactccgtcacccgggttggagtgcagtggcgcgatctcagctcactgcaacctccgcctcccgggttcaagcgattctcccacctcagcctcccaagtagccagaattacaggcatgtgccaccacgcctggctaatttttgtatttttagtagagacggggtttcaccatgttggccaggctggtcttgaacacctgacctcagataatccacctgcctcagcctcccaaagtgctgggatttcaggtgtgagccaccgcgcccagcctgtctctcatttttgttagggacaaggatattgtcttgtgtcccactggtgctgtaacaaagtgccacacagttaatagcttaaaacaaaacaaatttatgaccttatcgttctggaaattagaattccgaaatcaaggtgttggcagggctgcttccttctgcaggctccatgggaggattcattttccctgctgcccgcattccttggcttgtagcctctttctccatccatctcsctcccagcctcccaaagtgctaggattacaggcatgagccaccgcgcccctgcctccctcttagtaagacaattgtgattatattgggctcactgataatccaggatcatctgcccatctcaaggccattaacataatcacatctgaaaagtcccttttgctgtataaactaactcgacttattcacaaattccgaggattaggacatgaacacgtttgaagaaccattattccgcctaccacagatacacagaaacatttttaactgtaagaaagctatcaggccaaggatgatggcatttttccccagtattaaggagacctcagggaggggaggagagtgtggccacgtggagaacacatgctccatctaaaaggggctgctactcacttttagagtatggttattacatatgagaaactgggcctgatttgccagaacttcccccacttttttgttcaaagggaagcccaaaatctgggttttcatgggaaattattacattttgtcagtttcaaaaatattatgcaggccgggtgcagtggcccatacctgtaattctagcagtttgggagaccaaggcaggtggatcacaaggtcaggagtttgagaccagcgtggctaacatggtgaaaccctgtctctactaaaaatacaaaaattagctgggcgtggtggcatgcaccttttaatcacagctactcgggaggctgaggcaggagaattgcttgaacctgggaggcagaggttgcagtgagccaagatcacgccrttgcaygccagtctgggcgacaagagtgaaactctgtctcaagaaaataaataataaaatactgtgcagcagttccctggcagatattatgaaatgtgccaggctgggaggctcaagactctataaattgctgaatctgtgtcccctgcttcactcccagcaagagagaagtaacagaggtgagagtaagaagaagaatgatactagtagtgggtgacatttgttccagcatttctgagttccaacacgttatggtactcaacacattaaatgtattaattcatgtggttctcacaatggccctggaagatgggtgctatttgaagacccattttgcagatggagamactgaggcacagaggcactaagtcacttgcacagggtcacatagccagtaaatagcagattcaaactcagtcagtccctattctgtttctttttaactttctattttaaattaagtttagacttacagaaaagttgcaaagatagtacagagagttccctgaagcccttctcccgctttccctaatgtgaacctcttacataaccatcgggcagtgatcagaactagaaaaatgacataggtgcagtgcttttaactaaactacagactttatttggattttaccagtttttccagaaacatccattttctgttgcaggatccagtcaagggtccctgatatggtttgggtgtgtgtcctctccacattgttggaggtggggcctggtgggaggtgtttggatcatgggggcgaatcccttgtgaatggcttggggctctcctcgtgataatgaatgagttctctctgttaattcacctgcagatctggttgtttcaaagagtctgggacctccccctttccctctctcttgctctgtctcgtcatgtgacacacctgttccagcttcgccttccgccatgagtaaaagctccctgaggcccccccagaagctgagcagatgctggcaccatgcttgtacagcctgcaggaccatgagccaattcaacctctttgctttaaaaattacccagcttcaggtgtttctttatagcatgcaaaatctgatgacaaacacagtcccactttgcatgtagctgtgcctctctctctaggctcccatctgtgacagaccccccccccaccgccaccagtctgtctttctctcatgattttgacacttttgatgaatactagctggacattttggcagttgtccctcaatatgggcgtgtctcctgtttcctggtgattagcttgaggttgtgcacttttgtcaaggagatcacataagtgacgttgcaccctcagtgcatctttccaggggctgcacgatgctgatgtcttattattggtgatgttaaccttgatcatcatgctcgagtgcctcrtaagatcacaaatcctgtatctgtctgtcccaatggggcaaggagtctcgtagaaatctgcatggttctcaggtatgcctgccggagagcttggctttctctcttgttaactttgatcatcagagtctgggtcctaaccccttggtttaaatgctttctgtatgtagcgagagggaaaaatataaaacaaacacaaaatattcagcaggacacatcagcagacctcacccatcccttgggctgacctagtaaatacgtatgaagtgctcagtaacagtgaataacctccaaattttaagaaggcttaaaaacacccactagtgatggcaggagtgggaaagaaaagcacccacattcagggactttggaaataattcaagcaatgaagattggaagagatgatcagggaaggggaaataaatccagcagagatgaaagccaaggtccgcagctgctcggaccatcaaacctttataagcaatgtgaggtttttaaggaaaggagtgaattatagctgttaggaccaaggacaaaaaggctttgatctaaaagtgggagacatcttaaaggaagctgtggcttttgcataaggtatttccacatcctcctggggtgcattagatgaacccatttggaatttacaggtctgcagaagggcccttattcctaagggtatacacttgaaacaagcggctttgcaggagtggagttgatatttggagagagaaagcgtagcgctccagcaggcatacctgagaaccttgcagcgttttacgaggctccttgccccgctgggacagacagatacaggatgtgtgatcttacgaggcattcgagcattgccatgggaggtcattttggtgagcccttgacctctccatttgaaaagtatcagtttggaaaaggttgtctttactgccaggaaactttagaacagaggctataacatggctttttggacagtcactctgtcgctaaccagatgttggcctctgtttgccctggggcgagaccctagcctatgccggactttccctctcgttgagcactggctgccaaggactcatcacagcacgttctgcatcgcttcgccattgcagtgtatgcacggtgcacrtggctggcatcgcagaacgccatcaaaacagccccataggcggccatctgctgtgaagaaatcagaagtatgtgcaccacatacatctaggtgcattgggaggaagaagtaggggggcggatttttagctgggttaagtcaaatacccaccgaaactatgaatgaaccttccagtaggaccaaaaattacagcagattggaaatgggagaaaactgagatgaagaacaagcccccgaggcagacactcctgggttctaatcccagttttgctcataatctgtgagttttaatttgcaagttgcttaacctcaaggatgaaagcttcagtttctcacctcctgcaagtctgtcctcagatgtggagccttctctgatgacccaacccggaccccagtgttcctgggtccccttccagcttagctggctccagcacctatgaccatgggacacattattttatatatttatgcaccctcagcccctcctgactcatgtcagctccacagaggcagggatttcatcagtatcctgcttaggacagactggcacacagtaggtgctcaggaaacrtcagtgaaacgattgaaaggagtcaccgaccttgctctgttgttttcctttttggcrgaggataagctaggataaccacagctcggggctcagcatagtgcccggcacagagcagatgcccagcaatcagtaactattgctaatgtcaactcattcacttttttcattcaatgaatagttatcaaacgtttgttgtgtgccaggttccagctggaaatagtgccgagaacaaaacagatactcctttttttccccccagaaattatttcttgagagcctaccacgtgcctcccactctcccatgaacaaaagacagcctctgctcccatggggctcatattccagtgggaatgtgataaacaataaaagcaaccctgaagaaatgagatgatttcagaggcgtgctactaaaagaaaaagctttagaaccagggtcatgtgcaaggtgtggctggagttggggggagcatgggggctgctttagctggagtggtcaggggaggtcacatgtgagctgagacccaaatgaggaggaggaggagaagccagcatgggaggggctggggcccccacctgtggtcctggcagcatcagcatcacgaggggcgtgttagaaatctcaggcctcatccagaaccttcagagtctgtgaacggattgctcagctactgctgggcatttaccccaagccgacctttgttactaaggaatgtttggggcttgagagtgccagtcctctgctgagatttgcagtgcccttttgtaaaccgctacaaggcaaaataggtcgttttaggagtcctgcttctttctttttatcttttttctttttytgagacagggtctcattctgttgcccaaactggagtgcagtggtgtgatcacagctcactgcagccttgacctctgggttcaagcaatcctcctgcctcagcccccaagtagctgggactgtcaccatacacgtgtcaccatacccggttattattctgtattttgtagagatgggatctcactatgttgcccaggctgatctcaaactcctggcctcaagcaatcctcctgtctcagcctcccaaacgggcttctatttcttttatccacattcacagtataagactgagacatgaaatatttccagccaccatctgggtaggacctggtgtcattgagtgtgtcccctatgtggtcctggaagtcaaggactgtgtctgggtcatcttcgtctccccagcccttaacctattgcctgtggagggcatagaattggccaccctccatggtgggccttacgtagtttctcgacctttttttcattattgtcccccacccccactcccacctcaaggatcctttttagacattttttcttctagatgaaattacaaagaataagggagaatggaaattggaggccacccagatctctctctctccacccttagagcccttattggttttgcaagtttctcagcaagaaagacttctttatgaaaagcgaatgccacggacatgctgtacatctgtttatgtgctgaaggtgtatctctacttcattcataaaaagagtaacattcggccgggtgcagcggctcatgcctgtaatcccagcactttgggaaaccaagatgagcagattgcttgaacccaggagttctcgaccagcctgggcaacatgacaaaactccgtctctactagaaatacaaaaaattagccgggtgtggtggcgcatgcctgtagtctcggctactcaggaggctgaggtgggagaaacaaccgagcccaggaagtcaagactgcagtgagctgagatcatgccactgcactccagcctgggggacaggagtgagaccttgtctcaaaaaaaaaaaaaaaaaaagagtaagattcttctatctcccaagaaccaatcatcacccaaggaggtgaatattggttcttgggagatagaagaatcttacttgcttacaggcagtctcaagggtgggggtgatattgcccccttgagaatacgtgggctaaaatttccacaaaggaggggctcagggttgtcaaggagaggcagtcaggttaggatccgagtagagtcgttagggtcatagactcaaggcggactgctgcagtcagcatcccagctcggaaccttactgagtgaccttgggcctcagtttccccatttgtaaaatggggatggtattgatgatgacactcaccttataatgtggtcatgaggattaaattaattaatacaattaactttcttagagaagtacctgtcacacagtaagaatttgataagtataagtgattattgtaattatgtttgagaaaacctaagttgtctgtaagacagaatggacggggtttgttcatggagattgtgaggcactgagcattgcaccccccacttctccaacttgaccctgatgccacccctggctgaggtgttcagtgaatatttgtggaataaatggcatctcattcacatctctgtctccactttgaatgaatgaatgacgctaaggaaatagatcacgtctcattcatcgcagtttcccctgaaattcatatactgtcagcgtagggctggtgatgaaaaaatatttgtcgaattcatgaatccgtcagtttcactgattccgttcagcagatcagcactgaatgtctaccctgcaccaggtgtttctgagcatgtgtggggggctgcttgagataagcaaggtgtactgagtaaaagcctcctcccctctcagatcctcttcactaatgcggatagacagaaaatgagcacattcacccctctttgcccagcacccaacacttgacacctgggcagcccaggacttgaccccaggacatcycatacagagttctttctgctgctctgccccacgtccctcagatgtgtgactccgggactcacttgggggacatgcagccagtctcctagctatgccaggccctgcttytgtctctctcttgctgttacctatgaacttttgattcagtttggactctcgcacacaagtaaaataaaacccagcctaaactgacttaatatttttacaggaatttattgtaaactgcagctattacgggctccagaaatagatggatccggagctcaaacatgtcagccagatttggttcctctttctgtctctctttttctgtgttctgcagctgtgctttgacagactgtgccctcgtggtggcgaagaggctgcagcagctccagcctctttaccatatgtcatcttgagattccctctcattggacctgcctgttagttcaggtgcacacccctaaagcagtcattgtggtcaggggactgtgatgcactgattggtccaggctcagtcacgtgatgcatccctgccaaattctcaccagggaagtgtaagccatctcgaacctcattgccytgcatgggactgtatcagtgaaaatctctctctgacgtgtataacttgtttcagaaactctggtctttatgggttaccattcccgaggagatcctctgcaggaagaataggtatttggtcttgggatccgctgtgatcccctgatctgtttccaccacactgggtgaaggcagatggtctgtccctccctatattgtatcagatcatgtcactcccctgtttaaaagcctttgtctctggagattcccactgaaatcagaaataaaccccaatgccttgctgcgaccgccttacctgggcccagcaccgtgcagttcctgatgacctctctgacctcctctcgcacacttgcccccttatcctctcctgaatttcactcgctcttgcttctttcagatccttacccctcagggtctttgcactttgctctttcccgtaacctagaatgttctgtccccacgtcttcatgatgtaactggctccttcctatgcatttagcaaatgccacctcctctaagaggtcttccaaatgtattgatcccctgtttaactgaaatcaacaaacataaatattcagtccagcatgtgctcagagtagccccactgtcctgcaactcaccttttttttcaccccgcactgcattttggacatctctccacaccagcacatgtggaccgacatgtgacagctttctcctctgcagcaggatggctcttcccgcccctgctgcccccgccacccctgctccttccatggcattatcccgacttgtgtggcagagacacagtgacagggcagcctatctgaaatggcgttctcaggcatgcggattgttttattaccagttaaatatgctttatgctacctgtgaatgaggccattgtgacatttagcaactgatttgattaaacacagatgtgggctagactccacgtggagcaaagatgcaggaagacaggctccgggtgtgggtttggagtttttaagacggtgagaaggacttgacgactcacagcagcaaggcagatgtggaccaggcgtcctgttggtctcagagctgagaacgcaacatgggtaccccaggaggctttgtctgctttgggttctgctgtttggtcctatccaaattgtttttttttttttaaccttccctggatgtttttattcctgtgaatttttttaaatgacaaattggtgaaatgctagcacttttgacatcttcagtggtgattatgaagacacaaaaaattatcaccgtagctcccgtttgttgaacatgtactcgatgctgggctctggcccttgtatcccacgtctcacagaaccaccacataagccagataaacaaactatgcttagctccactttacagatgaggaaactgaggcttagaaagttcaaccatgtgtccatagttatcagggaaaatcatgagttatatctgaattctctgttgtcttccagcccgttccaggctctgaaatccaaggagacaggaccctgctctttctcaaaatagaaatctcaggactgggcatggtggctcacacctataatcccagaaatttgggaggccgaggcgggcagattgcttgagcccagaagttcgagaccagcctaggcaagagagcaaaaccctgtctctataaaaagtaaaaaacttagctgggtgtggtggtgcacacctgtagtcccagctgcttgggaggctgaggtgggaggatcgcctgagcccggggaggttgaggctgcagtgagctaagatcacacgtctacactccagcctgggtgacagagtgaggcactgttgaaagaaagaaagggagaaagaagggagggagggagggaggaaggaagaaaggaaggagggagggagggagggaaggaagaagacaggaaggagggaggaaggaaggaaggaaggaaggaaggaaggaaggaaggaaggaatctcagcacgtactaggcactcaacaaagatgtgatggctgaaggaaaatgaatgagcagctgagtgaatgaaaggtttgcccaggaggtgaggggatggggcagggcttgccagctgcagccaggtctttgccttcaccactttgtattctgggtaaagaaaagaaacagagaaatagactatgaagcctgggatttgtccctttctggaacttgggctgtggtcagggtgcttgagtgggtgaattttgtaacaggctcacgcctctctacccacttgtggcttttccattctatacattatctgctgactactttttatatcaccccccccccccatctcatacctccagaccttttccacttgcagtcctggtaggttttcagcaattttattttcacatcaacatcagtaagactttattaagatggagaacacatgctttgaggtgtcactgtggaaccagtacagaggtccctttgctatggggaaagaaattgtaaggtggaaggggggatgtctgttcactgggattacccatgaggcctcctttgcactgccggggctggcatgtcagatccatgggtgaccatgagttcactgtaggttggcccaaaagaactaaggcaggcagtggcctgtgcaacttcccacaggtgtgtggaggcaggacggcctgctggctgggagtcaggctgacctgggcttgaaccctgctccaccccttcccaggagggcctgcttcctagggctgtggtggagattaaacaagataatgcatgcaaactgataagcgatgaggaagatagtaagtgctcaataaatggaggctattattactagttcattagtatttatccagctgctaatgccaacaactgaaagtcttccaagggcttggattaagttaataccgggtttggcccaggaaaaggaggaagggtttgcatggtaactgtcacctctccttaaaaagaggaggaaatccagaagacaacaagcccaaggagggatgtttagaatcatcggtcatcagagaaatgtagactaaagacaacgaatgagatgttagtcccataggctggcaaaaatagcaagtgggattatgccaagtgcctgtaggggtgtaggatgtgggaaccacctatggacggggcacccagccattcaggaaattaggtctgtgcaaccttgggacccagtggtcccactctatcccaggtcccactatatcctgaggaaactcacacacaggcccacaaggggatgggtgcgagggcgtttatggcagccttgctggtgatggcaggagagagaggccatactggtgctgaccctgggggagtcagtaggagagatgtgaaggacacacatggaaggccaggtgtggtagctcatgtttgtaatcccagtgctttgagaggtcaaggtgggaggatcacttgaggccaggagtttgagaccaacctgggcaatatagcaagatcccaatctctagaaaaataaatatccaggtatggtggtgcacacctgtagtccctgctrcttgggaggctgtgggaggagaatcarttgagcccaggaattcagagctgtggtgagctatgatcgtgccactgcaccccagcctgggcaacagagcaagacctagtctcttaaaaaagaatgcaaatggtggaggaggagacatgcccacggcaacatgggtgggtcttaacaacttaatgctgggagaaaacagaaaccccacaaaacaatacacacagaatttacagaaacaaatgcctgctcccgaaacactagtgcatgttttgcactaatgcacaaacaagagaatatgcaacaggcacaccagaattagtgcctgtggagtgatggggaatgacaggaaacaaataaataacaggaggggtcttgggtgggctcataaggaaaatgtgcatgaaccaaattaactctgccttaacacccgaggtgcaggatggtgagcggggagggaccggcttctgaggctgtccacatagtttcccacgctgggagtgccacagttcctgggacataaagaatccctctgtcctttgtatagtaggtataaatctcagactacaggctcgaggggccagaaataaaactttattttcagcatgtcaatgtaatttctgtttattttgttgtttgtttgtgtgttgacatggagtctcactctgtctcccaggctggagtgcagtggcatgatcttggctcactgcaacttctgcctcctgggttcaattctcctgcctcagcctcccaagtagctaggattacaggtgcccgccaccacacccagctgatttttgtatttttagtagagacggggttttgccctgttggccaggctggtctcgaactcctgacctcgtgatccacctgccttggcctcccaaagtgctgggattataggcatgagccactgtacctggcccataatttctatttcaagccaccattcttctgggaaagtgagaaagtttcatcttagtcatttggggctttccccaaactctccagaattttggccatggttgtggaatcttactcagtgctagtctatttgtagtgctgaaggctcatccgrttctccatcatcaggacccaggccactgtcttggtctaggaggcccctttgggtctggactcttcacatctgtgtctttgccacactgaggacccaggaacctttcactattctgtcttcctagagcagagatcacaacctggaagcccacagccccctctacactacaaacacagttttgtttattttgttttgtttttggttttattttttggtccaactaactcrtatttgttacctgcatttaaaactcaggagattttacatacaaatccagaagccctggctacattagactcacattcttatggggcagaggttggctggagctgaatagtgttctatcagtgaggaatgcttttagctgcaagtaataacaagcccaactaatattggctaaactataatcacgttcattgtgtatttaacaagaactctctaccccaaggttcgtttggcatctcaattatataatcaaaaatcagattcattttatccttctcccattttggcctcagcatatgagccttttgcttctactctcatggcttcatggcccaacatggctgcagtcactccaggaacatcctcacatgactcgggaggaggtgtggggagtgaaacaaaagaatagtctttcccagaagcccccttggccaaaactagataatatgggccattctgaagaaggatccagcatcacatcctgcaagggaggccaggaatgcaagactyagtcttcatcagcctgggcagagggaagctatcaggggagcgaggaatcaggcatgcctgttgggaggccaagtggtatctgccacaaaccgctgctccctaaatacagcttggcattccagtttgccacagtccccaccatcccctgttgctccccagcactgaagccatctatcactgtgcctgcagcacctccttccctcactggtgttgcttgctacacctgtaaggtttggatgctgccggcctcggactcttcatgcacagaagtgaagggtccacagctgctcatcttcatcaatcgctctctctctcttttttttttttttttttttggaaatggggttttgctcttgttgcccaggctggagtgcaatggtgtgatcttggctcactgcaacctctgcctcccaggttcaagtgattctcctgcctcagcctcctgagtagctgggattacagcgcctgccaccatgcccagctaattttgtatttttagtagagatggggttttaccatgttggtcaggctagtctcaaactcctgacctcaagtgatccacccaccttggcctcccaaactgctgggattacagacatgagccaccrcacccagcccaacttcatctctttactctccttcttcccttgtctcttgtcctaccccatttccctagccttgaagaattgccctcctttaagaaaatcaggcctggcatgctggcttacgcctataatctcagcactttgggaggcctaggcaggaggatcccttgagtccaggagtttgacaccagcctcggcaatatagcaagaccccacctctacagaaaatacaagaaaacattagctgggcatggtgtcatgtgcccgtagtcccagctactcgggcggccaaggtgggaggatcgcttgagcccaggaagtcaaggctgcattgaactatgatggcaccactgcactcagccttggcgacagagggagaccctgtctcaactgaaaaaaaaaaatccctcttaattcatgtttcctgctaagccattttgcctacctcaatctaattcacagttggttcaccaacggcagccagtccacaaacagctgctggtctacagtaacaaatatggaactgagagaaaaagtgagacatgtttacagcaattagatacggccacagcatccaagcacatgatcctacgctcatctcattgcagagggtgtaggcgagtttgggactgttgcatcacagggccaattgcctgtggtgtgagttgcatgctaatcacacatcgtgaaccacgtcttagtccccaaagggttagacatttggaaacggattcttccccacagagctgagaaacacaggcgtacacctcaggtcctcccagactctcaggaggacttggaacctcaagagccaggataactcatttctgctgttccttctttccaccttgctatgccccagcttrggctccatgatccacgatgggactgtctgggaggaagaatcccaaggcagcgtctcaaaacatcaccctgacacatttgccttcctgcctgaatcctgggctcacttaccacttctcacacgtgatgacgtgatgaggaatacctggtgcatcctggacgtccaattgtccacctcggaccaccaccccaggagcacttcctcagcagagaagttgaggagaaatttccagaaaatgtacacatcctcagcattttcttgagtatctgtccattaaacatatccatctagatatgatttttaaatggtctaatccaccatgtaaaatgggatctggagttgaacaggcccctctggagtgcccccttggactgcacagctggggctgagttcgcagggaggtcaccccggtatcgcaggcaggcgctggctcttttatgcagttatctccagttattggggaaacaggaaggcatggcatcaggctccaggatcggtgcagaaaacatgttcgcttcccaaggtacatgtagcggctctcctggcagctgtaataagggaggatggctctttcgaactgaaaatattttgaagatcccaaatctcacccagattctgagcagctctggcacatgagctgttttgtgatctcagatctcgggttcgtgttrcatgggagggccgggcccagcttgtcctccctctgtccagaagagccttctgcggtgaatctcagcagcctggttaacgttgagtcataatattgccaataaaaggaaagaaaaatatggaaagggggtatgcagttggtgccaaagggagagggatttgttccctcaactccggagtggggctgaaggcatctttgaacctcagatatagtctcttctctcgggcctcaaggtgtagggtgcccaggagtgtggcagaaggcgggggttctgatctttctgggcctttctgtgccctttcttttgctgccaaagcctgggagacaggccatgggggcagtgtggggaggtagtgggagcagttttgttttttaaattaaggtaaaattcccataacatagaattaaccattaaccattttaaagtgtacaactctgtggcgtttagtgcgttcacagtgttatgcagtcaccacctccaattccaacacattttcatcgccccaaaaggaaaccccataacctttaagcggtcatgtctaatactccatcccccagccctggcaatcacaagcctacttttttttgtctctgtagactatcttattctggatactttatatgaatacaaatccctcagtatgtggccttgtatgtctgacttattttatttggcataatgttttttgggtttatttgtgtgtgtgtgcgtgtgcgtgtgtgtgtgtgtgtgtgtgtgtgtgtgtgtgtgtgttttgagacagtgaggcaggagaatagggtctggaggcagagaacctaaggccaattcatgctgacttcctagaactgaatcaaaaggaaaaccccacctctgcacacccaagtaacaaaagaatcagaggctactccctttgcaactccctgccccttttccactttgttgcagatgaaaaggagaaagtacctctgattgtgggccaagtcttcatttgcataggttataactttgtaactttacttcagcctctggtccttccttgcaaccagactggccgtgggccaagtcttcatttacttaaggtgtaaccagataaccaatgggaaacctctagaggatatttaaaccccggaaaactctgtaaccaggactcctgagctgctcccaccactctgtggggtgtaatttggtttcaatacatctgtgcttttgttgcttcattctttcattgctttgcttttttgtgcattttgtccaatcctttgttcaaaatgtcaagaacctgggcgactaatagtcaaggccctccaccagtaacaacagggtctcactcccattgcccaggctggagtgcagtggcgccatctgggcttgctgcagcttcaacttcccaggctcagatgatattcctaccwcagcctccagaagagctgggactacaagcrtgcatcaccatgcccggttaattttttgtatttttagtaaagatgggatttcaacatgttgcccaggctgatctcaaactcctgggctcaagtgatccaccctcctcagcctcccaaagtgctgggattataggtatgagccaccatgcccagcctcatttggcataatgttttcaaaggtcatccatgctgtatgtagcatgtatcagaatttcattcctctttatggcggaataatattccattgtatggctgaaccacattttgtttatccgttcagccgtcagtggacacttggatcatttccacctttcagccactgtgagtagtgctcctgtgaacttttgcrtacaagtttttgcttaaatacttgttttcaattattttgggtataaacccagaagtacaattgctgagtcatatggtagttttgtatgtacctttttgaggaatcatccagtgttttccacagctttttatgcaccgttttacattccaccagcgtgtgtgagtgttccattcctccacatcctcaccaacacattttttctttttctttttctatctttattatggccaacctagcgagtgtgaaggagcagcagttttcagcccagacactcgtgttgggtcatgggacctttcccactctgagtttctgtaaactgaaggacaatgcccaccttagagagtagacagcagcgtcacataagtcactgtacatagcatccccagcacagtgtccaacatgagagatgctgttcactggggcactgtattagtctgttctcatgctgctagtaaaacatacctgaggctgggtcatttataaaggaaggaggtttaattgactcacagttccacatggctgcggaggcctcacaatcatggtggaaggcaaaggaggagcaaagtcacgtcttacatggtggcaggcaagagaacatgtgcaggggaactcccctttataaaaccatcagatctcatgagacttattcactatcaccagaacagcatgggaaagatctgcccccatgattcaattacctcccaccaggtccctcccatgacacgtgggaattatgggagctacaattcaagatgagatttgggtggggacacagccaaactatatcaggtaccaaggccacctccaggcaccatattacccagtgcttctcattctcactgtcatgaaggacaagggcttcttcccccatttagcgtaaaataaaaatgaatcaccagaatatgtattctcagtaggggaaatatcatcccaagaggggaaaaagtggtccctgggagtggagcaaaaacacatacacatacagtcccaaaacagatatacagtctaactataatagtaaaatttcatgggaggtggggcaattaggggagaaaaaaaaattataaaagaaccctggcgaagggtggcaataatgaaaaaaaggttgagaaacaatgaagtttaaagcaatttaaatttgtttaatttttattttataatttttaataaattaaaagcgtgatttttttattagatttaacaggcataaagtactgtattaaattgctctggaggtttaaatttctctatttatctcagactggtaataaacacagtggctttcaatttctctatttatctcatcatagactggtaataaacggtttgtgagcaggcaccaatctgcagttcacacctcagtagtgctgtgcagaagcatcactgcgtctttgtctgtctggaattatctcacttccttatgtatctgttcatttgattgttgtctgtctctcttacctgaatgtcagtgtcaacaccatatctaaaacagtgtctgccacacggtgatatttggtacatcactaggaaatgaattgttgaatgcctgagggaatgaatgaacaaattaatgattgaatgaatatccacttaaaaattgttttgctggctgggcatggtgacttacacctgtaatctgagcatttagggaggccaaggtgggcagattgcttgagcccaggagttcaacaccagctttggcaacatggcaaaactccatctctacaaaaaattagccagatgtggtggcatgctcctgtagtctcagctactcaggaggctaaggtaggagggtcaccagagtctgggaggtcaagactgcagtgagctgtgatcatgccactgcactccagcctgggcaacagagtgagaccttgtctcaaaaaaaaaaaattattttactgagtcaggcactggaggctacttttacttaaaacccaagaaaaccaatcaaccaaaaatggtagcagttctctgcctttgacagagactcaaaatagcaatgtcttcaacaagaaagaagggtatttctctctcacctaaaagtcctaactaatgtggccattctagtctgcaaacgtgatgggggtccaagctcctcatgtcctgttgctcagctgcatatccaagatggccccattccatggagaaagagaagctgccactgcccttcaaaatttactcctatccctttgcctagaactcatcatgtggccacatttagccatagggaatctgggaattgtagtttttattctaatcagccatgtgcycagcttagaaacagattctattaatatgagagagaaggggtgaatcaatattaggggaccctccaggagacctgccaccatcaccttaagaggatgtttttttcatctcatcyttgccttccctcactgggcattgtatcagccagaaggaagaaagaggtcagtgtttcacattccagcaccaagcygggtctgtttgtcaaaaccctccagagaccacaacttgtggcacaagacttcaggggccacgtgcccccttcttcctgggtcctctctggcacaggatggatttctcactgcaggcactctgtggctgccctcacgctgtagtttgttcagctgtccattcttcagctgaccctgggtcacaaaatgaaaataaacaagagactattttggagaaagcataccaagggacaagacgatagcctgtttatttccaaacctgccctgagtcatcattcagaaggttcatgcaaaagaaaagagaaatcagaagagaaaacactgcagtsaggagtcttctgagacaggtggcttcctaagcttttgcaagtagggtcaccatggtaaccagaaccaaacagatgacctcgaatggaatagactgacctagaccttctgctaaatgtgtctgggcaggacattgaggatagagtgggattttgttgactatagtcaacaaaaatttaaatgtacattctcaaataactggaagagtataattggattgtttataacacaaaggataaatgcttgaggtgatggataccccatttaccctgatttgatcattacacattgcatgtctctatcaaaatagctcatgtcacccataaatatatacacctaatatgtacccacaaaaattaaaaatttttaaattaaaaaaaaatttaatgtaacgaaccaaattgtatattgagctgttggcacaaccacatagagaggaactatcttaaatgactttatttacacatatttttattcttttcctttttctttcttccttcctgatgtttccagcttttttatccttttctttctatgagaagaatttcctgtacccattctttctgggtagagctgctgtaacaaattcttttggttttccttcattcgaggatgtcttagttttcccttcattcctgaaggatattgtctctggatatagcattctgagttgatgtttcttttccttaagcccttgaaaaatgttgtgccatttccttccggcctccatggttcctgatgagaaatctgctgtcattcctattctttttcccttattctggcacattttgtttgattaataaatgaatgaataaaagaattaatcttagcttcacagcctactagctttatgacttgggaaaaactccattcctaagcctcagtttctctgtatggaacatgggaatggcaattatataccttcctctcaggatcgatgtgaggattaagtgcagttatatacaaagtgcctaatacagtgcttggtgcataaagcactcaataatctcagtggaatgaataaatgaatgcatgcatgaattaatgaactaattaatggcctcagtatctttgtgtagagaagccatgtgctgccatggaaaggccctgagctgggaagcatgagacaggcttaaggccttctctgctgccaagaccaaagcacaggatcagcactgtttgccttccctctttgtgcctcagtctccccatttggaccataaagaatttggcatggactattggttctcaattctcagtgtgtactagratctcccagaaaggtttgttgttgttgttgttgttttcatatactgatgcytggcccaactctagactaactcaaatcagactctctgtgggaagggccctcagactgcttttttgttctgttttgttttttgtttcaagttctttgggagattctgatgcagaacaagggttgagatcctatggttctgatggatccatcatcttggataattttagaggtgttgtggttcctttattatcctcttatcttctcctacctcaccccaggaagtaagtttcctggagtccattgtgttcattttagccactttataaaaagtagtgtgggctctagaagcttcttgtttgatgtaagtcaccgctcatttgagtagccatttgttttctaaccagcaactagtgtgaatgtttagagatgtgcctgcagttgtgcggttgctgctttaaaacctctgacagcagtccatgccccttcagcagatgcaaaccatgctccaggcttccgggtcctgaagcatccagccctaactttcttaatctggcctcatcttataaaagaagtctgttgattcagtccaattcctaccaaaatcccagatggtgtttagtagaaactgacatgcaaagtaactaaaagccaaaacaaacttgaaaaagaacaaagttggagaacttatactacctggtttcaaaactcaccataggccgggctcagtggctcacgtctgtaatcccaacactttgggaagctgaggcaggtggatcacctgaggtcaggagttcaagaccagcctggccaacatagtaaaaccccatctctactaaaaatacaaaaaattaactgggcatagtggtgggcacctgtaatcccttgggaggctgaggcaggagaatcacttgaacctgagaggcggagattgcagtgagcctagattgcgcctctgcactccagcctgggtgagaagagcgagattctgttttttaaaaaaaatcaccataaagcttcagtaataaggataggatggaattggtataggatagataaatcagtgaaacagaataaagtccagaaataaaccttctcatttatggtcagtttatctttggcaaatgtaccaagtaattcagtgggggaagaaatggataccccttctccatgatgtgtttatatcatatttcatacttatatcaaaacatctcatgtaccccataaatatatacacctactgtgtacccacaaaaattttaaaaaataataaaatcagtgggagaaaggatagactttttatagtggtcctggaacaactgtgtgtgtgtatatgtatatatacacacatatacatacatatatatgcacatatatatatatgaaaagatgaatttaagtccttaatccacactgtatacaaagattaacttaaattggatcatagacctaaatacaagaatactgtgaaatttctagaagaaaacacaagagcagttctttgtgaccttgaattaggcaacaaaagcaaaatgcatcaaagaaaaaaatcaacaacctacaatcttttgctcttcaaaagacaccattaagaaaaagacaagccacaaactgggagataatattcacaaatcatgtatctgatcaaggacttgtgtccaagatatataaagaactcttataacagtaataagaggccaaacctaattttttaaaaagatttgactagggtttgatgggaaaaagatttgagtagatatttcatcaaagaagatatgtgaatggctaaaaagcacatgaaaaatgcccaacaccattagtcattggagaaatgctacttaaaaccacagtgagatacaaccacatacttcgtagagtggctgtaatcaagaagactgaaatgaccaagtgctggagaatcgagaactctcgtgcattaccagtcagaatgtaaaatggcacagccacttaggaaaacagtttggccatttcttttaaaaggtaaacatatgcttaccacacaactctgtaattctactcttagggatttacccaagagaaatgaaaatatatatccatacaaagacttgtatgtgaatgcttatattgcattatccataatagcccaatattggatgttgtacatctatgccattgtgcattgttgtttaatgggtacatagttccaattttacaagaagaaaaatgttctaaagatgaatgatggtgatgagtacccaataatgtggatgtagttaatgccactgaactgtacactttaaaatggttaagagggtaaattttatgttgtatatataccacaattttttaaataaataatttttattttttattttatttactgttttctagagacagggtcttgccgtgttgcrcaggctggagtgcagtggtgagattgtagtttactgcagcctcaaactcctaggttcaagcaatccccccgcctcagcctcccaagtagctggaactataggcatgcgccaccacacctggaatttttttttttccaagatggagtcttgctctgtcacccagagctggagtgcagtggcacagtcttggctcgctgctacytccgcctcccgagttcaagcagttctcctgcctcagcctccctagtagctgggattacaggcacacaccaccacgcctggctaatttttgtatttttagtagagayrgaatttcaccatgttggccaggttggtctcgagctcctgacctcctgatcctcccgtctcagcctcccaaagtgctgggattacaggtgtgagccactgtgcccagccaatgttttaatttttttgtagagacaacatctcactatgttgaccagactactagagtggccataatcaagaagactgaaactaccaagtgctggagaatctagaactctcgtgaattcctagtaagaatgcaaatggcacagccactttggaaaacagtttggccatttctttaaaaagtgaaacacttaaatgaccaaactccggggctcaagtgatcctcccacctcagcctcccaaagcattggaattacagaaaaatctgaggccaccacacctggcctcaaattttttaaaaacrtaattattaaggaccaggatctgggtagtgggcactatctcacttatttctcaccatagccctttgaaaaggacaccgtttattttcttcatctatccaggaaattgaggttcagagaaatttggtaaccaaagtcacaggttccatcccagcctgtcagacctcaaagaccccacctggccatggtaccctcctcctgcatgttcctctccgactgtaagaaacctaacctggctcttgggtctgggccgccaacatgccatccggacagaggaagatccagagacttaggggtcacgtgagccatagccacggccgcatcagcaagcacttggaagcacccaggaggccgtggtgatgctggtggtaggcgtcaccagaggattagtgtcaacaagtctcacctgggttgctttgggaacgctggtgtgaggcattaccactaggaaccagagcttctgcccagctgtcacccttgaagccacatggagggaggttcatgaaatgctaacaactgctttaaagagaaaaaaagacaagaaccctaacctgtacccctgttcctccttcccacaggcacaacagggttctatcaaggaggaaatggactgggcaacgcagccggtttygggagtgtgcaccaggtagacatggctccctcccgattctttcctcagttctttctggaaatattccccttacatcagggcacccagagagcccacgacacacacaatccccattgggaacctgcctcttagtccctgggtttggagactacaggggctagattgtgcaaaaggctgctggaaggacacagtatacaggcggagacgtaggaattgttagaagattcctgagatgtcatggagatctacaagtatgttccatcttgacctggactcaggacacccattgactgttgaatctgatatatatcaatacaaatgggtgggttctttcaccagaccatgggcttctcaagggggaccgtatatcttgctcacctctgcatccccagtggtgagagcccagcacacagtgggggctttataaatacttgttaaatagagcaaagtcaactctatataggtaaatgttggctagtactttgattctcttggtgtcacttacaaagtgaattaagagttcgcatctgctcaaagtgtgcagtaactctgctgtgtgtacaccttccctgtacamctaaaattatttcaaaacaaaaggttcacctgctttcargctaccatttaaaacagaaccaccctggggtagatgggctttaggaatatttaacatatttagatctgaggaatacgcaatttcttttccagtgagaatctaaataatttaaaacttagcaaatgtaaaaattgtttcatgtatttttgcattatttctaatgtactatgtacatagataaaatacttataaataaaacagtactttttaagatgtggttcttaaccctccatttcaccattaaatctgtgtttttcaaaaacactgaccacccccgcaacccccacccccaggaactctgactcccagctctggggtggggcccaggaagcagaacgttccatgagttccgtgcagggttgagaagcactggtttggtgatagtgcggcaggatatttgaaacaatgactgttggagaattgggatcgctggtctgcttaaacaaagcttgatcaaaggtgattggcagctattgaattgatctccatgactccctcatagaatattctggacccctaatgctgtgtaggtgctgctgtatttgcacctcctccccatgaacataaaatgtcacctagtctcctgggtttgtgtgtcgtgtgggtgtgtgtgcggtcttctaggtttgtgtgtgtgtcrtggggggggggtgcrgtgtggtcttaattgttaatgcatttgtttattaatttaaccagtatttgttgagttactgcatataccaggcactgtttcaggtgcagaggatacaatagtgaccaggacaggtgccatcagggccacgtctatatcccttagggtggcctgtggacctccaggtgccagcatctgcatgcctgggcccaaggggcttttctagaaccagtgcacggggcaggcaggaagtgcctgggaattaaagccccctgggtgcagctctcraagaccaacaagttgatgtataaacccctccactcccttgacccgtgggagaggcagttctgagatgtggattttagaccatctcagcttttcctcatagggctcatctctggtcactaccacagaagcacctatgcaggctgctctcccgcatctctctcacttccccgatcccctgctggtgtctccttcaccttccaaacagcctccttgcacttgaatccttgccccggggtctgcttctgggaaaccaaaatgaagacagtttctgcccacagagagcttttattctaatggtgagacagagyggccaggctgaccaacggcccgagcccagaaaggcttcctcacmtatgtccttggtttgtttttctcttcccaggactatccttcctaccccggcttcccccagagccagtacccccagtattacggctcatcctacaaccctccctacgtcccggccagcagcatctgcccttcgcccctctccacgtccacctacgtcctccaggaggcatctcacaacgtccccaaccagagttccgagtcacttgctggtaggtgcagtcactggtggggccattcatggctgtggtctgagagcttctatgaaggagggacccgcacatgggtcccaattgtaacaaacaggttacccaagggtcattcatggatgtggcctgagagcttctctgaaggagggacctggatatgggtcccagttgtcacaaacaggctcccaagggctaaatccatctctcagacatgttttgttggcctgtttgtgcatgtgtttaattgcatttacgtttaaaagtcagaaaattttataaatacctaaaaattctattttctggcttcttttgaaagaagatctggccatagtagccacattcccaaggaacaccacttggttaaaactaagtgtgtctgctctttttagaaaggacacacccaattccacatctagctagcttaccccatgttcattactgcctggcccatgtaggccttggagttgatgaaccctggtagtatttataatattaccagctgggcacggtggctcacacctgtaatcccagcacttttggaggctgaggcgggtggatcacctgaggtcaggagttcgagaccagcytggccaacatgatgaaaccccatctctactaaaaatacagaaattagcctgagtcatggcaggcacctgtaatcccagctactagggcggctgaggtaggagaatcgcttgaacctgggaggcggaggttgcagtgagccgagatcgcgccattgcgctccagcctgggcaacaagagtgaaactccatctcaaaaaattaaataaataaataaaatacccatctgtttcgtgctgagcacatacctgtgtggtcttctctaatcatttacttatatatttattcaacaaatatttggtaagctcccactgcattccaggccctccctttagtttgggaaataaagtgcagtgtagagttaagctttgcagacaggaatcaaataatcatacaaatatctcattacaaactgtgataaggagaggcataatcctcacaaaaacaggtttatattatccccaccctttttctagataagaacaatgaagatgagagtgataaggagcttgctagtgattggtggggctaggatcccaatcccagtttgttggcccccataaccagcactcctgctatgcactggccatacacagccaggaactgtgtacacagcctggctgtgtacggccaggaatatgttatctaaaatccgtttgagaacagaagggcagaggctttcaaatgttgattctttgtctaagaggggttcaagtatagcgactcagggtcctcaagaattatacaatccttyaaaacatccttaagcatgttcattttttttttctttcaacttgtattttaggtttggggtacacatgcaggtttgttacatgggtaaattgcatgtcgtggaggtttagtgtacagataattttgtcacccagataatcagcacaatacccactaggtagttttccagtcctcaccttccttccatcctctaccctcaagtaggtccttgggtctattgttcccttctttgtatccatgtgtactcaatgtttagctcccacttataagtaagaacatgtggtatttggttttctgttcctgtgttaattcacttaggataatggcctctagccctatccatgttggttcaaargacatgatcttattttttatggctgcgtagtattccatggtgtatatataccacattttctttatccagtttgccattgatgggcatctaggttgattctttgtctttgctattgtgaatagtgctgcaatgaacatacacatgcatgtgtctttatggtagaaaaatttatattcctttggatatatacccagtaatgggattgctggtatatatccaaatggtagtttcattttaagttccttgagaaatcttcaggccgctttccacagtggctgaactaatttacattcccatgaacaatgtataagcattcccttttctctgtaaccttgccagcatctgttattttttgactttttaataatggccattctgattggtgtgagatggtatatcattgtggttttgatttgcatttccctaatgaccagtgatattattttttcatatgcttgttggctgcatgtatgtcttcttttgagaagtgtctgttcatgtcctttgcccattttttaatcgggttatctttaaggatgtttgtttctgatggcacaatagttttaggaaacccttttgattagccaagattttttggcttcaaaagacatagaaaatccaattcaaactagtttaagaaaaagcaaatgaacttttaggcatatctaacctagatgtacaggggtttagagctaggtccaggtgttccaatgacaatgttgagacttagtttctctcttccttctggctctgaattttcctgggttcgttccgttctcaggcaagctcctcccctatggtggcaaagatggccaccagctacccagagctcaatcctgtctgctaatccatcccagcaaacatagttcctccttcttagccattcctgcaaaagtcccaagtaaagctcccattggcccagcttaggtcacatgctcatccccaaaccaatctctgtggtcagtggaatggaatgctgggatgaagcagcagactttgggctcatgcctacggctggagctagagttggggtcagcctcacctcaaccaccagggactgagagtgaggaagaggtgatcacctcaaaaaacctagagcattgtaactacaagaagacagaagagacamtgggtgagcaaaaacaataaatgtccacaaccttgatatggatgccacctacactatgagcaacatgtggcagagtccatgtcctgacccctctgtggtcacagaacttrgtatgtaacatccctatgcaactaatgcaccagcctgtggattcattcattcattccccagacctgctatgcacatcttctcttttacaaggtggttttggcttatcaacattaaataacatggcagcaatacgttagaatgtcagtagatatcactgagtttcgttcctttgtcttcttttctgaaacctactgatgctgtagggctttgcagaagctaagctagcacgatggtgtggagacagtcatcaacaaatattaattggttgattgttagaaaaggaacaatagggaagacccacctgttttgttcctggggttcttggtgtggctattgattttagcccttaaattttccatcactgggaatgagtgagttatccttggtttgatgacaaatggagacaatatggcaaagcatgttaaataaagtcaactttttaaaaggtttagagcttgagcattgattttggtcattgtgatctcatcccagaatatttaatgatgcatagtacctatttaataactttctttgaagagtttgaagtttaacaaagtttttctctgtcatcatcttgaattatctttagccatcctgattttcagaatgtggttcttccgatctcatttcaacaaaggagataaaaacaaaacattgatgagaaattagggcagagaggaactataagcaggaaaccatcgagtagatgccactatccgtctataattcaatggtgaactgaatggcaaacgaaaaacttacctccccagaatttgagttttgtgggaaggttctcttcattcccatcaggagtgaatataaaggctcattgtgtctttgaaatttttctgtcttgtttccctctgttcttcctttatcccttgatcaaaggttcaacagtaagtggttgagatggtttttactgtgtgtctaacaagctgacataaaatctaatgacgtaaataatggtcagctgtagctgaggtctcctgcctctttttcctagtgttcactgtaaaggaatttaagcatatgtgtgtgcacatgygcacgtgcgcgcgcgcgcrcacacacacacacacacacacacacacacacacacmttcatgcactctttttaaatttcccataaaaactctacttttgaaattatccaggatatccttgagtggttggttccaaactccagaggctctagaggtttactgacagacagatcacactcactgtgtgcactgcctggatatagtattttggtgctctcaccactcacatcccccatgcaccccatcctcgccacaggacactctgcattgacatgcattaatgtgtgtgtgaagtgccaacaatttgcagatgattacagggcaatttgctgatatagagggcagaatctgaacatctcatgttacttaagagaaaaaccaaatcattggttacttaaggatttttttctttttacatttttaartatgatacaaattatctaaaaagaagttgaaggattttttaacttctaagatcaacttcctttgccaagagaagaagaatttttttaatctctcaagaagaaattgggaaggctcttccgtgtaatttggcaacatctaacaaaatttaaaatgcatagaccttttaactcaactattcgacatctaagaatttatccgraagataaactttgacctaggtacaaacacttaagtaaaaagaatacttatttttttcactgattaaaaatttattaatactattatgcaaataattttagtgataaccacaagggttttgtactgttagtacataaatacatacaaaaatgcattttgaaacttcttgtatcccctttatccttttcaatttctgtttatgtttgctctacaatatatatgatggatctgtgcagtagaaaattttttgctgatgagtatggtacaatcagaaatgtttggagactgtatcagtttcttcttgctgctgtaacaaattattatgacctttgtgtcttaaaacaacacagtgatattttacagttctggaggtaagaaatgcaacatggctctcactgaactaaaattgaggggtcagcagggttatagtattggaggctccagaggagaatcacttccttgcccttctacctgcagaggccacctgccttccttggctcatgaccctgcatcattccagtttctacttacattgtctcatctccttctctaactcctgcccccgaccccttataaggactgttgtgattccactgggcccactcagagaatccaggatcatctccccatctcgaagtccttaagtcagtcacatcaagaatatttattttttwaaaaaagaatatttattgcagcagcatcatagcaaaaggctggaaacaacctggataccatgccattaacaggaaacaggttaaatcaatcatggtgcatccaccagtagcatactatacagctgttaaaaagaataagttagatatatttgtgctactatgggtttctctttgagctattgtgataggttaaaaaaaaaaagcaggaggcagaattacatgggtaatgtgagcctgagttttttaaaagtttaagtgtagcttaatacccatatttactcatattccataaggaatttctagaaggatgcaataagaactgttaatagtcattttctctggagaggaaaacaagatctggagtgaaaggaaaagactgtatgtaacaggcaatctgtagaacactccacccaacagcagcaaatacacattcttttcaagtgcacatgggacatttaccaagataaatattaatatcttctgggccataaaacaagtttcagtacctttaaaagaatcaaggcatacaaagcatgttctctgacagcagtggaattaaattagaaataaatttcagaaagatttttgggaagttcccaaatcttcagaatctcaataatatacatttcagtgacccatgggtcaaagaagaaatcaatgggaaattaaaaagcacttggaactgaatgaaaatgaaaacaaatatatcaaaatttatggaatgtcattaaagcagtacttaaagggaaacttacagcacgaaatacctgaattagaaaagaagacacaattaccacaggtatcaggtgaaggaagggagggagggaaatgagggaggggggagggagggaaatgagggagggagggagggaaatgagggagggagggagtaaaggggagtggaggggagggaagattggtcaaaggatacaaaatttcagttaataggaataagttcagaagaactattgtacaatatggtgactatagttaataaataaggtatttgtattagtctatcttcatgctactgataaagacacacctgaaactgagcagtttacaaaggaaagaggtttaatggagaactcagttccatgtggctggggaagcctcacaatcatggctgaaaaaaaggagaagcaagtcacatcttacgtggatggcagcaggcaaagagagaactcgtgcaggcgaactgccactttcttaaaaccatcagatcttgcgagactcgttcactatcacaagaacagtgcaggaaagaccctccttcttaaagagacaaggtcttactctgtcacccaggctgaagtgcagtggtacgatcatagttctccgtaacctcgaactcctgggctcaagcaatcctccctcagcctctcaagtagttgggactacaggtgtgtgccaccatgcgcagctaatttttaaattttttgtagagatggggacttgctcctccttgtcttcggccatgattgtgaggcttccccagccacatggaactgagttctccattaatgctctttcctttgtaaattgttcagtctcaggtatgtctttatcataattcagtcacctcccactgggttcctctcatgacatgtgggaattgtgggagttacaattcaagatgagatttgatggggacacagagccaaaccctatcagtgttatatacttgaaacttgctgagagagtagattttaagtgtttttagtaaaaaaaaaataaaaaatatgtgaatgttaattagcttgatttagccatccccaatatatacatatatcaaaatatgttgtacatcataaatatacacaatttttatttgtccaattaacaaatcatcatcatcatctacagggttgctgtgaaaattgaaataaaaaggccgggcatggtggctcatgcctgtaatcccagcattttgggaggcacaggcacgtggagcacctgaggtcaggagttcaagaccarcctggccaacatggcgaaaccccgtctcyactaaaaatacaaaaattagccaggcgtggtgccacacgcctgtgatcccagctactcaggaggctgaggcaggagaatcacttgaacctgggaggcagaggttgcagcgagccaagattttaccactgcactccagcctgggtgacaaagcgagaccttgtctcaaaaaaaaaaaaaaagaagaaagaaaaaaagagagagagagagaaagaaaaaatgtgcattgcctattattattattttgagacagagtctcgatctgtcgcccaggctggagtgcgatggtgtgaccttggctcactgcaacctctgcctcccaggttcaagtgattctcctccctcagcttcctgagtagttgggattacaggcgcccactaccatgcccggctaatttttgtgtttttagtagagacggggttttaccacgttggtcaggctggtctcaaactcctgacctcaggtgatccacctgcctcagcctcgcaaagtgctgggattacaagcgtgagccactgtgcccagccaaccctgccaattattaagtaacatgcaaatataaataatgattaatgaaaatatatttaagaactcactttaacccagacagttaaatataataattttcatccaaagatatgattatttaacttaatttaaaattttttaaaaataagaaaagaagaagtaaaacttcatgaagtaaagagataaaatgacctggtcacctatgtagaaaatctgatggaatctatgaaaaagctactagatctaaaaagtaactttagcagtgttgcagggtactaggtgaatatctaaaaatcaacaaacaacaggaaatagaatattttaaatgccatttgaaatagtatcaaagatgtgaaatactcaaggttaaatttggcaaaagatatgcatgactttacactaaaacctataaaactgctgagagaagttaaagaaggcattaataaatggagatatatacctggttcgtgaatcagaagacttaatattgttaaaatgccagctcttcccaaattgagctataagattaatacaatctctatcaacatctcaggctttttttaagaaactgtcaagctgtttctgaactttaaatggaaatgcagaggaccaagaagggccacaatgacttttgtagagaagaacaaagttagagggctaagactacctgattttaaaatccattttaaagccacagtacttaagacaatgcagcactggcataaaaatagacaaataaatcaatggaacagaattgagagttcagaaataggttgggtgccgtggctcgtgcttgtaatcccagcactttgggaggccgaagagggaggatcacttgaggccagaagtctgagaccagcctgagcaacatagcaagaccctgtctctgcaaaaaaataaaaataacccaggcagtgggttgtgcctgcagtcccatctgctcaggaaggtgaggtgggagaattgcttcagccaggggtttgaggatacagtgagctatgatcataccactgtactccagcctggatgacagagtaagaccctgtctccacagtaaataaatgaattaacccacatgtatatggtcacctgatttttgacaaaagacaattcaatggagaaaggacagtcttttcaacaaaagatgctggaacagccgagcacagtggctcacgcctgtaatcccagcattttgggagtccaaggcaggtggatcacctgaggtcaggagttcaagatcagcctggccaacatgatgaaacccygtctctactaaatatacaaaaaaatagccaggcttggtggcgcacacctgtaatcccagctacttgggaggctgaggcaggagaatcccttgaaccagggaggtggaggttgcagtgagccaagatcatgccaccacactgcagcctgggtgacagagcaagagtccatctcaaaaaaaaaaaaaaaaatcgtggaacaactgattatctatacttcatacctcacatgacacacaaaaaaaatgcaaaatagatcatagacttaaatataaaactgtaatcttctacaagaaaacataggagacagttttgtgactttgatttaggcaaagatttctcatatgtaacaccaaaaatatgatccaaaaagaaaaaaagaatataaactggacttcatacaaatttaaaactgttcagagaatgaaaagaaatccatggtccaggagaaaaataattgcaaggcatatctcgaataaagcatgtgtttatatagaatatagaaggagtgttcaaaatccaataataagaaagcaaacaatctgataaagaaatgggcagggccaggtgcagtggctcatgcctgtaatcccagcactttgggaggccaaggcaggcaggtcacctgaggtcaggagtttgagatcagcctggctaacatggtgaaaccccrtctctactaaaaaatacaaaattagctgggtgtggtggcatgtgcctgtaatcccagctactcgggaggctgagtcaggagaatcgcttgaacccaggaggcggaggttgcagggagccagaattgcgccactgcactccagcctgggcgacagagtgagactttgtctcaaaaaaaaaggctggctctgtgcagtagctcacgcctctaatcccagcactttgggaggccaaggacggcagattgcttgagcccaagacttcaagaccagcgtgggcaacatggggaaaccctgtctctacaaaaaatacaaacattagacaggtgttgtggtgcaggctcgtagtcccagctactcaggaggctgaggcaggaggatcgtgtgagcccgggacatcaacattgcagggagctgtaattgtgccactgcacttcagcctgacagagtgagaccctgtctcaaaaaataaagaaataaaaataaagaaatgggcaaaatatttgaacagatgatagatgcctcaccaaagaagatatagggatggccaaaagcacatgattaagatgccaaatgtcattaatcattagagaaatgcaaattaagttcacaatgagacaccactacatacccactggaatggctttaatcacaaagacggaccataccaagggctggcaaggatgtggagcagccagaactctcatccactgctggaaaatggtacaaccactatggaaaataattcatctgtttctttctttttttttttttttttttgagacaggttctcactctgttacccaggctggagtgcagtggtgtgatcatagctcactgcagcctcaacctcctgggctcaagtgatcctctggcctcagcctcctgagtagctgggactatgggtgtgtgccatgaaacccagttaatttttgtattttttgtagagacgggggtctcattatgttgcccaggctggtctcaaactcccagggtcaagcaattctctcaccttgacctcccaaagtgctaggattacaggcatgagccaccatgcccagcctcatccattttttcaaaagttaaacactacttattatatgacctagcaaacaagctcagtaaaaataaaaagcttacatctagaccaatgtgtgaattaatgttcatagcagccttattagaactgaaaactagaatcaacccaaacgtctacctacaggcgaatggataaacaaattctgatgtatccatacaattgaatagtactcagcaatagaaatgaaatattagkctgggcatggtggctcatgcctataatcccagcactttgggaggctgaggtgggcggatcatgaggtcaagagatcgagaccaccctggccaacatggtaaaatcctgtctctactaaaaatacaaaaattagctgggcgtggtggtgcatgcctgtaatcccagctactcaggaggccaaggcaggagaatcgcttgaaccggggaggcggaggttgcagtgagccaagatctcaccactgcactccaggctggcaacagagggagactctgtctcaaaaaaaaaaaagaaagaaagaaatgaagtatcgataaacaccgcatgtactgaatctcaaagcaattatgctgaccaaaacaagccagaaaaaagaatacatactatatgattccaattgtttaaacctctagaaaattcaaaccaaagtctatagtgaaagaaagcagtttagtggttttctggggagggtaactggaggaagagcttatccaaagggataacaaggaaattcttggggtgctggatttgtttattatgttgattgtggcaatggcttcacagatgtgtacatacgtcaaaacttaagaaattgtgtactctaaatatgtctagtttattgtatgtcagttgtgcctcagtaatgcgttaaataagtaaacacattaaaagagagaaagaaaaagaatgaaattactycaagaaaggtttacataaattgtgctatcctgtggatctctgactgtgaccttgaacttttactctgtattagtctgttctctcattgctataaagaaatacctgagactgggtaatttataaagaaaagaggtttaatggctgggcacagtggctcattcctgtaatcccagcactttgggaggccaaggcaggcagatcacttaaggtcaggagttcgagaccagcctggccaacatggtgaaaccccatctctactaaaaatataaaaattagccaggtatggtggcgtgtgcctgtaatcccagctaaagaaaagaggtttaattgtctcatcattcctcaggctgtacaggaagtatggtgctggcatctgctcagcttctgggaaggcctcaggaaatttgcaatcatggcrgaaggtaaaagggaagcaggcacgtcttacatagccagagcaggaaaaggagggggtcaggggaggtgccacacatttttaaacagccagatctcatgagaactcactcactgtgcggtacctggggaggggagatggtgctaaaccattcatgagaactccatgcccatgatccagtcacctcctaccaggccccgcctctaacactaaggattacaatttgacaggagatttgggcggggacacagatccaaaccatatcactcctcattstcaagaatgtgtacgtttgggtaaaggcctgggtttttctgtttgtttttttgttgtttttttttttggyacccctgcgaaattggtttcacacagaccttattttagacatttcttagataactagcatttacccctctttttaatatttgcctgttttaatggggggggcaaacaaatgttttctaagcccagtagccttaaactaccaagtgaaccaggaaagaccttatttacattgctcttcagcatctgtgaattgagaagaaattctttttccagagraaagtctttgctcactcaatgtttgggaatctctcatgctgcatcctgaagactctggggaggtggaaaacacccagccatcctgacagcgcaaaatcatgtcttgtcttattatgtccttagtctgttaagaagcttttataaatattaaataaacaaagttcagtcccttgggtcttaaagggaaatagttctttcagtgtagaaaaaaactctccctagccaagtctttttagacaaaggattttcccctgatgatccaagaactggcaattagggcaggaaggatggggtctgtgtgacacatttgggagctaaaccaagcaactgtaaagtgagaaaatgggatgggatgtcctcgaaggttcacgctgttttacagttctgtcactcacgagtgacaaggacaggtccaaattttagttctggctytgccactcatttgcagactcacatggtccagtaagtcacctcactaaacctgagttacctcgttagctaaataaggatagtaaagtacaatcaaaagccatgcatttaaaacatctgtgcgtaagcagcaacacagctctgatgctggctttaggacctgggtcggggacagtgctgcttcacttgttggkgaccactagacaatcrccggtgggcacaagtgtgacagcctctcagtggggccacacccaggagcaccccaaagtgagaagcagcaaggacccacattctgtgctgcgtctctcactaatccacacatatccatgggttgactccagccagaactccattcaagtcacctcctaactgccaggcctgtgctagatgctctcgcctatataatctcatttacttctcagattgacagctctcagcaggtaaagcttaaaaggcttgcatttaatagagaagtggyggggcacrgtggctcacgcctgtaatcccagcactttgggaggccgaggcaggtagatcacctgaggtcaggagttcgagaccagcctgaccaacagggtgaaacctcgtctccctgtctctactaaaaatacaaaaattagccgggcatggtggtgggtgcctataatcccagctacttgggaggccaaggtaggagaattgctgaatccaggaggcagagtttgcagtgagccgggatcacgccattgcactccagcctgagcaacagagcgagactccgtctcaaaaaataaaaattaaaataaaaaaatagagaatagagggagcccagcagggagaggaaagtagagaatccttcccatgcagcccccgtttacctctggggcagagagaggggaatcttctaaaggtggaagagtgtaatgctcagctacagataaatacgtgttgccctccttctgttcatctaggcatgctcaggatttcagattgagagagttgtaaatgcataactcctccatcattacagcacccagtggcccctccctcactccctgaccgaggccttccctgactagccccatataaatgagtcacctttcagccctccccgctgccccaccctgattgattgaatacttgattggttgattttagagaagaggcctcgctctgttatccaggctggagtgcagtggcgctatcatagctcactgcaacctctaactcctgggctcaagcgaccctcctactctgcctcccgagtagctgggactataggcatgcaccaccacacgaggtcaacttttctatacttcatagagacagggtcttgctatgttgcctaggctggtctcaaagcaatcaagcgatcctctcaccttggaggtgctgggattacaggcgtaagcccccacgccgggccccctgacttgttaattctctgtggcacatttccctcccgggcttggtgtatgcttacttgtcgatgtgtctgatgactgtctcctctcactagcgttgaagtgctgtgagaaccaggacataatcccactgcctggagcagtgcccgctgaccaagtgtctgctggatggatgaaagataatgaaggtcaccaatgggcaatttaagggacttccaagggcagttttcatcctacgagatctttgcctctggtgctgccttggaacccactgctttggagctagacrgtgctgttgggatatttcccaggaggagacacccagcaaagcttctgatttgtccaccattccctttcttacgccaggtgaatacaacacacacaatggaccttccacaccagcgaaagagggagacrcagacaggccgcacygggcctccgaygggaagctccgaggccggtctaagaggagcagtgacccgtccccggcaggggacaatgagattgaggtaatccaaaggggctctgtgtgacctggtgaatgtaatctccatctgaggcccaaacaagagtggggacagagttttctccaagtacgaggcggagaatcgcccttcgtgttttacaaagcatgagcagggaagcatgaggttgtccaagcaggtagycctggggccaggacagaagagaggttctcaaactgaagcagcatcagaatcacctggggggtgggggatggtgcttttgaaatcagggattgctgggcctcagcccaagagtttccaattcagyagatctggggcagggcatgagaatttacgtttctgacaagcccccagatgattatgatgctctggattgaggaccacactctgagagtccctgataaagaaaagaatgggcctccgaccttccagctgggttaaagtggttctctaccctggttacacagcagaatcatctgggatgctctttaaaaaacagataccctggccccatcccagatcaattgaaaagactcactggaggaactaggggggaggaggggagttttaaacattctcggtggggactctaataaggcttagatattgatctgtgtggaggctggctctaatgagtgtgcctctatttctgggattctgggattctgacttctcagaaaggggctctcaacctggactgcacacgacaatcacatgaggactttgagaaaccttcattatcaagttgcacctcagaccaattaaatcctattccctgagggtagaagctaggcatcagtgtttttaaagctccgtgggtgattcctgtgtgcagctcaggctgagaactagtggtcagggatgctccaatctttttttttttttttttttttgaattggagcctctctctggctcccccatcacccaggctggagtgcagtggcacaatctcggctcaccgcaacctccacctcccaggttcaagcgattctcttgcctcggcctcctgaatagctgagattacaggtgcacgccaccatgctcagctaatttttgtatttttagtagagacgaggttttaccatgttggccaggctggtcttgaactcctgccctcaactgacctacccgccttggcctcccaaagtgctgagattacaggcgtgagccgccatgcccggacttttttttttttaatcaggtatacatgaggttttcaacaggttgctatgggatacatacagatagtaagatgataatcatcatgaaacagattaccaagtctaccatctcacaaagttactttttctgtctgacaaaagcagctaaaatctacttatttaacaaaaatccctaatacaatataactttgttaactctaattcttgtgttgcacattagatctctatacttgtcatttgttatgcaagtgtagtaktattggccaggtactgacattttcccaaaaacaaaacattatgcctaggggagggtaccagtagaaataggcaaaatggatgccccaaaaccggaagtaagctactgttgtcttatcaagggaggaaaatgagcaaactcaccggtttatacttctttgaaaaaggcagtcagttgctggcctgagtgtgctaggtgtctcggtaggattgtcagtgccaggcagttcaagtacaccagygtcacatccctatttataatctgtatactttatgcggcagctgcaatgctcagccacaaactcaaacacactgagaaagatcacctttgtcatttccttaaaaagcaatgtaattttaaccctgagtccccatgccaccagatggtaagaaatttcatttcattattagggaccctccactcccaggattaaatgagaatccaggggtcaagtggtctcagaaaccagaccagcctctgacgtccagtgtggctgggtggcccctgccaccttcattgtcaaagcctgcagtcgtcactaaaagtccagccactctctggtgtttccatgctatacaatgggtatggaaatctttgttgagcctgagaaccttgaaatatttgctacaattctttggttgcaagcaacagaaaccagtwccgggcccagcacagtggctcacgcctrtaaccttaccactttcagaggccgaggtgggcagattgcttaagtccagtaatttgaaaccagcctgggcaacatggcaaaacaccatctctaccaaaaaaaaaaaaaaaaaaaaaagccagccatggtggcacacacctgtagtcccagctactcagggggctgaagtggaaggatcaattgagcccaggaggtagaggctgcgttgagccatgaccacaccactgcactccagcctgggcgacaaattgagaacctatctcaaaaaaaagaaaccagttctggttacttaagcaaaaatgaatttactaggaaaggacaatgagaggaggccgtaaaaccaagtttagaaagaaagtaacaaagacattgttgagaaatctaggaatgccagaaagcaaacattttagagtgcagtgtcctgtccttcggtgtccgattccaagaagacagtatcccagtggcctagcttgggtcttaccccttaattgacagccccaccaaaatagcacacaatggggaaggaaaactaggatgctcttttcagaagccctgargttggaagctaggggtggggaccgggacctccaagcaacacatgctgacttcagcatgttcagggcatttgatatttagccagtggtccctagttcacctgtagcagttgtttatagctggggtcggttctgatcaccctggaagatattaaatatcctgaacatcatgcttggtgccctacacttggtcagcctcccgagatctaccagtagccttgatccatgctagagacctggtgcagagcaagtgttcccactgttcctggggccattctyagtccagggaattctgtccttgctttttgccttgttcttaaagctccatcctttccccaaatagaggagattttgcacaatcccttcagtgggtttaggcctttgcaaaagactgaaagaaaacgtattggcgtcaggttgtacttgctgtctgccttcccatattcctagaatctcctaccagcttgaagttgcagagcttcgaaaacacagagagccacacatacataatattccctccccacaagaaaattattcagtcacctaacatgttttctgctctctgtaggggaacggcgggggtagagagagatttttccattaaactgagaaagaggtggggagggttatggcatagaagtcagggattatagggtgatattattctggaaacatctgcttcttgatttcagcataagtaccactggcaagaaccattgaaaaggtgtgagctgtgtttcacttctgtgcttaatgtcatcatagaaggtttgcttgggtcacacctcttaagtctttggctgttttgctaatgactgaagcccacgggagagaaattatgtggaagtggaaaggaggaaaattctgagcatgtattagttaaaatccttcagctgcacgtgccagggaccaacttgagctacttaggtgaaaaagcagaatttattttaaggatacagggcctctcttagaacttaaggacagaagtagagtagagtatcagcgaggcactggaaccagcaagggagacagggacaagaaactgcatgtatgccttctcttcccatttgccacagtgaagatgacagaactcccaaactatagtgtcctggccgtgccttcatgtgctagttactgggcacagctctcctctgggcctcctcactcctcctttccctctactcccaatgaaaccaggtcctggtaaagtgttagtttgtttgtatctttcaccttctgttcttgtctctggagactacctgtcagatcccggggtctgggtccagcccatgctgaagtccgaggggagtgggtggatgggcagaaagaacactcagggggccataggaggtgaaatgtagttttatttagcagctttctcatcagcagctttctcacattagctgtctcacattgtccacctttatctcggctgtctgcttcagctctgcggctcctgctgccctgacagctgcagccgcgcagccggctctcccttgccttcagggtcagcagcttaactcttcccctctctgggcaccagcgcaagctgtgctgtggctcccctctgtctatctgcaaaacagtcattctcccttacaggggcctgtagcttcattccctctctgggcaccagcgcctgcacaagagccacattgagccaaactgagccaagagccatgccctgtgcacagcgtcagcagggcaattatatcttctaaagacagtagtgactgcaagccaagtatgaactacacaaacaggttatataacaagtggaggtatgcacctgcacgccaaactcgctgagtcacgcaggcctgggtatccatctcagcctagtccttgaccaaagcacatccatgtgccttacgctgcccttgtctccccttcagatcacatggctaaacttggccaccaatagccctccccaaaagacaattactttcttcctagccccaattttaaattgcaaaataaaaggtctctgacccacccatggttaaggacgcaccctggtctgcaccatgatggcctagggaatagggtcacctgcagaatggccaccaggaacttacccactaagaatcgaggatggtgaggtagtaggagaaagggatggatttttttcagaggggatttaatggataaagtaagggagcctgcactaaatttgaaaatatttgctgatttttaaaagttctattactgaaatttctaaatttaatttcctaagttcaaccccagtgaattcagataagttargacttggcatatttgaatckcagaaggtccttctcaaacactgattttcaaacatttttaccatgacccgtaataagaaatatacttactatgatggcccagcatatatatgcacataaatataactggtccaaaagatttatgaaataatacttagccttactaattgcttcagaaatccctgtactagagaatctgggatgctaatacctttttcattctagatatttctcttaactttcaaaggcatggcaaatgccattgtgttaatacagccattgacctccagagagttttaaaaggtggcccactcaagattgcatactggggagggacatttgcctccccttctcaacactagctacagagttagtcaggtcctttgtccttgaaaataatgatcaccagaaaaataaagaaaatcaacagtatgaaaaataaagaacaagattagccaggcgtagtggctcaccatgccagcactgtgggaggccaagtggggaggattgcttgcattcaggagttcaagaacagcctgggcaacatagcragaccctgtctctacaaaaagaaagatcaaaaattagccaggcatggtgccacatgcctgtagtcccactactcaggaggctgaggtgggaggatcgcttgagcctggagaggtctaggctgcagtgagtgatgattacgccactgcacacaggccctgtctcaaaaaaaaaattttttaattaaaaacaataaaggccaaggtaaataaatgggataagttagaagtgaagtaatttaagaaacataaaataacttaggaaaattctaattggttttcatataaaaactcaagatcttgcatccataaaataaaaagtggaggctactgggaaaggaatactcagagggaaaaaaagttattkgaaatcttttaattactgcaaaaatcaaaaatttaataagggttataagagaaagtttaagaaatctcccagaacacagatcaaaaagacagatttattaaaaaatattatttacaaggaaaggcagtatcaacccaaaaggtttgatttgactattgggaatttcacaaaaagaaaacagtagaaaagatgggagaaaattattaaaagaaataagaaaataaaaattttcagatctgtagaaagatgcaagtcattgggttgaaaatgctgaagtgccaaacagaattcattaaaaagaagaccatacccagatatatcttcatggaatttgaggataccaagtgtaaagaaaagatcctttaaaattctagaaagaaaaaaaaggtaaaacctacaaggactgaggaacagtgaaataccagatttctcatcagtgaccctggacacttaaaaaaaatgatgaaagaattcyttcaaagatctagaggatattgttttcaaattggaattctgtacccagagaaactatagagaaaaataaagataacttcagatattcgagaattcaggaagattactttycatgtaccatttcaggaaaagcaacttaaggatgtattcaagcaaaacaaggaagaaaaccaaggaagagagacttgggatccagaaaacagtggatccaacccagaaatacaatgaagggaagtctgcagcaagcctaaaaatgatccagtccacattggaggtttctatcactgaggatagatatctccaatacagagtgtgtggctgaatttgacattttaatgaaggtacattgttgcaaacaagaaaaaattaataaattctgacaaaaccaaaaaagttacatcagacaggtatgatacatatatgaacaaactgagatatgacattattttaattatgatggagtacaagtaaagagaatacatacaatggtaggggcattctccttaaaatcaatctggggatatgacattggacacatagagaagacaatgcaatcttagcatattacttggctctgtagtgaacaataatcacaaaatgtaaatgtatattactagttaccaacttttaaaattgacataggcagagtgcagaaaatttaaccttagttataaaaccaatgtacaaacaagtttatcctcattgacaatatgaaggtaaagctacagctgatagacattagagcggggaggatgtatgggaaaaggtagggactcccatatcgatagctccatgtttgtttacctttttagccaagggagaatgtccaaggagaattggaatagagggactcacatatgagaaaaatgtaagtttccagagaaacaacagagatttccatgagttaaaccctcatcttttaagactgcccagtcaaaagatattgtctcaagttgaaaaatcagtaagggtataaatatgttacttagaattatagaggtgatcaccagacttgctaaaaacagaaatagttgagcgtatggtgaacagtgaatttaaaatggtggtatttcattttgtaaaacgagttatatgattttcgttgttgattttggcctgaatcctcctttttgagcttttatatggaaggcaaggacagacttcttgattctgacatcttttgagttgataagagcccaaaaactgggcatccgaatacacatgacacagataaggttggatggggattcatgacacatcagtgagttacatgttttgtaactaaagataatgtttttcgagacttcttttcctccaagggaatgaatttctgcagacattaagtcagatgyacgtgagtccatttttctccattctcttcctctctttcatcacagcgtgtgttcgtgtgggacttggatgagacaataattatttttcactccttactcacggggacatttgcatccagatacgggaaggtaagaatccattttgtctctctctctctttttttgttttcaacgttattgtccagccagtttgtcctggaaattgtgcggacagtttatgaggcagcttctccaacaaaagctgccctttggggtcagcccaggtttaaaaattcctatgncattttcctttgccatgtgaaaatttaattagcttccccttctattgtcttccatgccttttcttccaacgtttgaagcaatcaacatttacttgataggaaatacacttgttgtcttcagcngtctcccttcctaagacagtgggctatggtgcagccaaagccagtaattctagctagaaaacgaggtaaagtacttttcttcttccctgttgtttatcctagtgtctccrgcagatgaatttaattttccttctgtttttttgagacaagggggaggcattgtcagctccagtgtggatcttagcaatsgttttgcaaatgtatcatcaacaaattatgtcggggaaccatctagttagaattctaggcaaatgctattggctgaatcgtggtggatggaagagaccttgaaaccactttaataatgcaaaaatgaactcaactgctaaaactcaaaccttgtcaattatttgggttcatcccatgggctactgaacagacgacgagtggatgccctagacatctgtcatctcttcaggggcacgcatggggtggaagggcagtacttaagacgacagcctagttttcatctcctcagaggtgagtgacccactggcagctgcttccacgcatgggtaggaaccttgagacttgccagcgcctggaaaatatttctgtttctgtttagagaccaggaatatgatttgacatcacttcatggcttttccagctgctcatgttttttatgggggttataacaagctggatgtgtaattagcaagatagatttatcgtctgccattatgttgtaaagaatataaaaatggtgttggtggtgcagaaatctcttgccgtgtaggaatgccgttaatatgtctagcagtgcctgtgggaaatccagcatgcatttttggactgtgcacagcttaggtaaaagatggcagagtcaagagctgctgaaaacactgaagaatgggctccacagccattgcaaaaatttgggctatcccaaaggggccacagtagtaagttgcctgctaagtcgtggtgttttatggttttcctaaccactcctgtaaagtcacctcccctgagacacaggcactcaytcatcttgcccttagaggcagcctgctgtgaagttccatagctccgtgcaacaactcacttagtatggattgtgtagggatgtgtgatcttgggtatgatttttgtatctgtgtctcaccaacattcctcaaaccaaactgtgggctccttcaagtcagagacaaagccccgagttcctttctgggccccatgtcccctggcccatgccattcctcactgccagccacctctctcccacctcaccacccaattccagccaccttcacctccaactcggcttcctatctggtctcccagcttctactcttgcccactgcagccycctacattggagtcatcctgaaatgcaagcttggccatatcactctccagccgaaaaatcttcagtggcttccccattgacaagcctrcccccagcctccaaggctcttcatgagtagcctcctgccccattctccagcctcctttcctgctcttaccctgagttgtttttggtccttgaacctgccacattctctcccatcgctgctgggtttctcccagaagatcctgagacaaagagtgagtgcgagtaatctatctgggaggtaatcccaggaagtagtggggaattcaggcaaggagggaaaggaagccaatacaaattacacaaatataatagttactgccgtgggcagttggggctaagtcccaccagggacagtgttaacccacccaaggagtgagggagctgggatatttacctgcaaattcccttccattaagcgttgaaggcttttcctggaaattgtctccttgcacttctggcctgtccccaagaagccgcagagggcagccttggtggctgacacctataatcctagcacttcgggaggccgaagtgagaggattgcttgaggccagcctgggcaacatagtgagaccccatctctttaaaaaacttaaaaattagcctggtgtgatagtgtgtacctttggtcccagctactcaggaagctgagaagggaggatcgcttgagcctgtggtgagctatgatcgcaccactgcactctagcctgggcaacagagcaagaccctgtctcaatcaatcamtcaatcaataaaaagagagccccagggtagagcatcacaaatgctaactgtggaaggtttcttcwtatatgtacaggaatggtgmcagttgaggggacgtggagctggggcacactggaagcctctgctataatctaagatgttctagaatgttcttttattaagttaaatcctacttatctttcagttctcatttaaaacgtagcttcctccaaaaggactttcctcagtactcctctccatctaaattgcgtctgtcctcataactgtgttttccattcatgtcataattatgtttattttatgtcttccttctaggctataagcaccataagggcagagaccatgaacatttttttttatttccccaaccacgcgcagtacacagggcagaattgctcaataaatatttgntgaatgaatgaatcagggtgatcccctagaatgttaagctgcacgaggacagggacctttggtttggtttggtttggtttggttttgttcatagctttatcaccagtgcatggaacagtgtctcccacttagtaggtgtcaagtaaatatttgttaaatgaaggaaggaaggaaggaaaatagtatcaaaacagaaatttttaactggtggccgctggccaaattcatactgcagatatttctctttggcccccagagtgtttgaaaaaatgtgaatgtgtcgccaacatttaaaaatcaggagaytgcacagaccaaaacaatctagatttccagctcttcttgaaaaattagaaatctggcaatcctgcattcccctggggccacaatcaacaggagcagaggaggactgccctcttagggggggtggacattctccagcccatcgcagcccccacctggcctggttaacccattcttgggactctctggccccattrgtatctgagtttcaacatccatcctagaattacagaatcatagaagattagagctggaaggacttgagagatcatcatgtccagttagtctccatcgtccataaggagaaactgaggctcagagggagtaagatcatccaagaaagcatgagaatcagactcaagctcacctgccttcctgtgtgatctctggatgtccagggaaaactgaggtgaaaagctgttagagcacccagatcgcctgtgccatcttcatgactctcctagaattttccattccctcctccagctctcgctaaggtgaggaatgaatgagtattatcatttgctaaatctagcaaccttcagagagacccaaaataattgtgacttaaacaagatgcaagtttatttcactcccctgcagtccagatggaagcagttcaagctggggaaactgctgtgcagcaccagagaccacagcctctacagtcttattccctgccattttttggagtgtcaccagcattggcaagataaatcatagcttacccccatgtctgcattccagccagtaagcaagaataggaaaagggggacttgcccctctcttttgatatttttattttcttgtccctctttttttattatttttattaatttttttagagacagggtcttgctctgctgcccaggctggagtgcagtagcacaatcatagctcactgtaacctcaaactcctcactcaagcaagcctcccacctgagcttcctgagtagctgggacaacaggcaagtgccaccatgcccagctaatttttaaaagttttttgtagagatgggatctcactgtgttgcccaggctggtctcgaactcttgggctcaagtgattctcccacctcggcctcccaaagttctgggattacaggcctgagccaccacacccagcaagccccacttttttaaaggccagactcagaagttgcaggcatcacttctgctcttatcctattgggcagaacttggtcagatggcctcatctasctgcaagggagtctgtgaaatgtactctttatttgaggctgtcatggccagttaaaatttagatattctattactctgagagggagaaaagaagaatgggtattagaggacaactagcaatttctagcccaaagtactgtatagtaaaaggaaaaacaattaaatagaaaactgatgaggaaacataaaattagttatgtttgagaggcctgagggacaacaggatttgtaggtctgaagctccagagagaggtctgcactatagctctaagcttggatgtcagagaagtaataaggaygtagaggagaagtgtgagccccattttgcagacagagtgactgagatgagacctacagaagttgtgtagttggtgggatattcatgacagaaccaaaactcatggcctcagcttctggctcacagttctttctstctgtacttccccagcactgcagccatgtgaaacttgttattaatagctgtcatcaagtatgacattcagtttgaagtacagcatatttaagctgcaaagaaaatttattgaagcacaataattgaaaaacccagggatacctgggattcaggtctggctggatccagatgtttaagcaatgttcttaggtcattctgtatctcttagccaattttctccatgtggtaactccctctcagcaatcccaactaaaaactggaaatttctagtacccacattccagcacaacttctaggcgttaatgccaatgtcccaaactgggtcacatgcccatccatatgccaacctctgtagctctgattggccagccaaatcaagagcccactcctggcatgggaaaggaggggcagatcagctccacctcaaccaaatagagtgagagagggaggatggtcccccaaaggaaactggagtaatccttccagaagagtatgaaggcccatggatgtccagtgaatgggcactggatgccaagatcccctgaacatccatgacaagaaccagcagcactttgcttgtggccatcatgctgcataccatgcaggaagccaaaatcattaatagtaccagccagagtggggacttgctgttttttsggggaactaagcccaacaaagctaaaatgattggggaatgattcaaaataggttgtttgaattttaagacagaaactgggctcccgttctgttcccaatcaagggatgtgctrcttgaggctgtcatctcttcacttcctttccatttcttcctccccagtgctcagagccagaacatccctttggtagctgtatctcccagcatcttgtggatccattagaaattccctagagagctggagcagccagtgactgctgcctctttcctaacccctcccttcccctaccaccctcctccgcagtctctgaactctgtttttttccagctggtattaggcaaatgcaaggtggtcaagagcctttgcctgtggccaggaagggattctaaaagaaattagtcagctttcctccagggattcatggggagttgccctgactcctccttttgtgccttgccttctaggcagcccactaccaatatgaagctcaactccaggacctgttgttgttgttgttgttaataacaattttattgagatacaatctacatatcataatttaccctttcgatgtgtacaattcagtaatttttagtatattcacagagttgtacaaccatcaccactctaattttagaatattttcatcaccccaaaaagaaaccctatactcactagcagtcacccctgccatttccttctccccctggcccctgacaaccactaatctactttctttctctacagatttgcctcttctggatatttcatataaagggaatcacacagtacgtgtgatcatccgtgttgtagcatgtatcagtactccattcctttttatggccacataattttccattgtgtattagtccattttcacatggctataaacaaatattcaagactgggtaatttataaaggaaataggttaaatcatctcacagttctgcgtggctggagaggcctcaggaaagttaacgaacatggcagaagaggaagcaaacacttccttcttcacaaggcagtaggagagagaaagttcagagtgtagggggaagagccccttgtaaaacgatcagacatagtgacaacccacccacccaccacaagaacagcatgggggaaaccacccctatgrtccaatcacctcccacgaggttcctccaccaacacaaggggattacaatttggattatgattcaagatgagatttgggtggggacacagagccagaccatatcacagttcatggataaactatattttgtctatccatttatcagttggatagttgaagtttgggccattatgaataatgctgctatgaacattggcatacaagtatttgcatgtgcatatgtttttaattctcttaggtatatgcctaggagtagaattgctgggccacatggtaactctaggtttaatgcttttgaggaacagccagattattttccaaagtgactgtatcattttaccttcccatcagccatgtaaaatggctccaatttctccacatcctcatcaatatgttattgtctgcctttttggctatagtcctagtaagtatgaagtggtatctcattgtgggtttgattggcatttccctaataatgttgacaagtgactagtgatgtttttatgtgcttattggccatttgtatatcttctttggaaaaatatttattcaaatcttttgctcatttttaattggtttgtctttatatcattataagagtttttatatatctggataccagtctattatcagatatgtgatttgcaaatattttctctctcattctgtgagttgtctttccattttctttgtggtatcctttgaaataccaagctttttatttttatgaagtgcaatttatgtatattttctttggttacttttgcttttggtgtcatatctgagaccctattgcctaacctaggtcacagagatttactcctgcacttttttctaagaattttctcattttagctcttacatttaggtctgtgatccattttgagttaatttgtgtgtatgatgtgaggcaggggtgcaacctcattgttttacctatgactatcaagtcgtcccagtagcatttgttgaaaagactcttctttcccctactgaattgtctcaacatcctgtcagaaaatcaattggcagccaggtgcagtggctcacacctgtaatctcagcactctgggaggtccaggcaggtggattacatgaggccaggagttcaagaccagcctggccaacatggtgaaactccatctctactaaaaatacaaaaattagccagatgagatggtgcacgtctgtaatcccagctacttgggaggcttaggcatgagaattccttgaacccgggaggtggaggctgcagtgaaccaagatcatgccattgcactccagcctgggcgacagagccagactctatctcaaaaatttttttaaaaaatcaattggccgtaaatatgtttatttcttgactcttcattttatcccatagatctgtatgtatgcccttatgccagtaccacactgtcttgattactgtagctttgtagtaagtttcaaaaatggaaagtaggagtcctccacctttgttcttatgaccagtcttgacctttataattggcatctccattggttttattttttgtggttttaacatagcctttgcacttgctgttgttccctgtgccaggaatgcccatctccccattttctacatggctcctttattcacgaatctgcccagtggctgggcgtggtggcccaygcctgtaatcccagcactttgggaagctgaggcaggcagatcacttgaggccaggagttcgaaaccagcctgtccaacatgatgaaaccctgtctctactaaaaacacaaaaattagctgggcatgatggcaggcacctgtaatcccagctactcaggaggctgagacaggagaatcacttgaacctgggargcggaggttgcaatgagctgagatcacgccactgaactccagcctgggcgacagagcaagactctgtcycaaaaaaaaaaaaaaaaaaggaacctgcccaaatgtttcctcatcaaaccacctgatgcgttaaatatgtattatttattacctgccctctccaacacacacacatttgaatgtaaactctatgaaaacaagcaccagggccaggattagcmttttgtaggcacaaaatttaagtgggtactgagaaacagagtaatcaagctcaatcatattttaatgcaatattttacaaatcaaaattgatgccaaaaaatcgatcatgaaagaaaatcaaaatgtaaacaaagacagatggttgtgtgtgttactgccctgcgttattgtgygatgggaacagtttccaatcagcccctgactccctggcctgagtgactgttacctctccacagggcaggtttatgagccttggcaatggcaggaacagattggccaacgagaggctttaatatatagtcatcttttgtgttttgttttttgtttttgtttttgttttttactgtagagcttttattaactttttccacttgagtcaaaatacagaaaaatgttttgataagtgtatgtaggggccacatttttcctcttgcctcaggccctgtggcttggcctggaatggcaagcaccagggtggtctgcctcccagctgtagcccccggacctagcacagggcctggcacatggtaggagctcagtaaacgtttgttgattacatgactgtaatcaagggagtattttaagtgttagtagcagggagagatctcaacccacacagcatgcatgaaatagaattttggttttctgtaacgcaatggaattcctacttgcagcctttgttctgctgggttctttttccttcctcaccaggttatatcagacttccagggagctcacaaagcacccagggattgggtgagagtccrtggacccacgagtcctctgtccacttacgacactgctgacatgtatctggttcctgtccctaggggtgcttcaggtctggtgggatctggaatctcagtgaggctggctatggtcctatctgcctgaccccctagcccagactgtcactctcttaggttttgcttcctggcacacgtggcagggtagggaggcctctgaaaacccccttccatccttcagttgttggaagtcaggacaagaaaccartsycactcgctcascatcccaaggccaaaaagctcaaaatctgctaccttatgaatgggaggctggaaaacagggaactgagggagcagagagtaacaactcacatctcrcccatgttcttgttggcggatacatcagatccttgagggagygaacyggagtagaagggagtgtttggaaaagggaggaatttgcagttgtcacggtgatgggaggcacaacaaacccgtgaatcaacccaccaagataccattagtggtctccatagaaatgtgtgcattttctcattttattcaacaaatatttatcaagtgcctcctgcatgccaggtgtactgttctaggccctggggatgcggcagggaacaaagtccattaaaaactctgccctcatggagctgatatccttggggagaggaaggaagatgataagcaagayacatagaaatgcaagyggccaggcacagtgacacacgcctgtaatcccagcactttgggaggctgaggcaagtggatgacttgaggccaggagttcgagaccagcctgcccgttatggtgaaaccccatctctactaaaaatacaaaaattagccaggcgtggtggtgggcacctgtagtcccagctatctgggaggcttgaggcatgagagttacttaaacccaggtggcagaggttgcagtgagcctagatcatgccactgtactccagcctggacaacagagtgagactctgtatcaaaaaaaaaaaaaaaaagaaagaaagaaatgcaaggccaggcatggtggtgtacccctgtaatcccagcactttgggaggttgaggcaggaggattgcttgaggccagaagttcaagaccagcctggacaacatgagaccctgtctctaaaacaagaaagagagaaagaaaaaacaaaagagaagaaggaagaagaagaagaagaaaagaaaaagaagaagagagaaggaaaaaggagaagaaagaagaagtaggaagaggaagaggaagaaggaagggaagggaaggggaaagaagaagaaagaagaagaaataataatccagagaaaaagagaagttgaaattaaatttgagaaaaatgtggccagggaaggaggccacacagagaagctaaattttgaataaggcctgaaggaagtggaggaacagaaatctggtggaagggcagagggaatggcacatgcaaaggccctgcagcagaagtgtgcctggggagtttgagggacagcaaggaggccagtgtggctggagcacagcagactgactcttaagttggagctggtagagatttggagtagaaggacagagtctgccctggtttcagtatggtttgttgagccccacaaagtctcatgttgaaatttcatccccattgttgaaggtggggcctaaagggaggtgtttggatcctggaggtggatccctcattaatggcttggtgccattcttgcaggagtgagtgagttctcttagttcccgtgagaactcgttgttgaaaagagcctggcagctccctccactctctctcttcctctctctccacatgtgatctgcacatgctggctcccctttgctttccaccatgagtggaagcagcctgaggcctcaccagatgcagatgctgttgccatgcttcttgtacagcctgccgaactgtgagccaaataaacctcttttctttatcaattccctagcctcagatattcctttatagcaacacaaatggatgaagatggaatctgagttccattcttatttatctttattttttatttatttattttagagacagggtcttgctctgtcacccaggctggagtgcagtggcatgatcatagttcactgcaacctcaacctcctgggctcaagcagtcctctcacctcagcctcccaagtagctgagactacaggtgcacaccactgtgcccagctaattttttttgagagacgagggtctcagtggctggtctctactcctgggctcaagcgatcctcccccctcagctttccaaggtgctgggattacaggcgtgagctactgcatccagcctgagctccattcttaaggagcccctctggctctccccggggagaggagagtagaaagtggccaggttggaatcctggcgatgggtgaggaggctactgcaccagtttatctgaaagactgaactggtctttctcagtttaccgttctctccacccagggagtggagatgcaggcggggaggagcacagtaggctgggtatattttgaaggcagaccagccacagataaagaaggtaaagggagtcctaattctcaccaccaagctgcaamgatgccctgttttccatccagggtctccccctgaagagacctgattgcttctacccctgttggcaaccagccaattcctcctgaacaaattcctcaagctttactgcacatttcctatacaccaagcactcactatcaattttattattttcttaagttaagcctcaaaggcacagcttgagttattcatattctttgtccacacaaggcccctttcttgtttcacgtaggtactaccaatgtgtttccttttaaacctatttgtgctcctttccctcccctccctatatagctcagtgtatagccttttgtttgtttcctgtaacatatacattctctttttgtgtgcatttatttcttatgtgtataggtgacattgtttaaataccctgtgtttcttacctttctccctctgtgctatggtttcacttatttatttctgagacaggggtctcgtcatgttgcccacgctagtctcgaactccagggctctagtaatcctcctgcctcagcctcccaaagtgctgggattacaagcatgaggcaccacaccctgcctgcactrtggttttagatcctcccacatygccatacatacaactctatcactctaacacaatagttttyaaccagaggaagttttggcccccaggggacatttgacattccccatttttggggaatgggatactactggcatctagtgggtagaagccagggatgctgctacacatcccacaatgcacaggatggccccacaataaaggatgattgggccctccgggtccatagtgctgtggctgggggcctgcatctgaccgctgcatagtcccaggtcctccaggtcttccttatggcactctcttcagggaggacactcaggcttcctcagctccgcatcagcacagacagagctgtgacgagcaacctttatggactgctctgagctttacaccctctctctcatttaatccccaccatgaatctrtaaggcccagctgctccctttatactcatttccagagaaactgaggcccagagaggtgatgtgacttagtcaaggtcacccagcttaggagggatgaaagccaggaagtggcccactgctctttaatttattttttattttatttttctgcgacagggtctcactctgtcactcgctgaagcacagtggtgcaaacacggctcactgcagcctcarcttcctggkatcaagcaatcctctcagctcagcctcttgtgtagctgggaccacagacatgcactaccatgcccagctaattttttatgtttttttgtgagacagggatctcactttccccaggctggtctcgaactcctgggcttaaatcccaaagtgctgtgattacaggcgtgagccaccatgtcyggccgctccactgctcttaaccacgtaacatgtccctagtgatccatgtgactgtctcgagggtaaaaattaaaagcctctggaatgaactcttctgctgcctcttagctcrtggagcacagggactgggtctgatgtgttcacagctttatcccaatacccagcacagtacctggcacctccaytggacaaatatttgttgaataaacaaataaacaaagggctgccaggtagggagttttcacttgtgtgatggcaaatacagcagaaataagattccagggcattcacccacaagggagcagacagccacgtgtgtgacaagcaggggcctggcagcctctgtctcagactgagatgctccatgccccctagcctggcctcacctagagcctggcccacagcagggtctcagcaaaggcttcacaattttgttttcagacattgcatccatcccctccttcctgaaaatgtctttgttctactgtccttcatggcagtttggctgggtatagaatttttgtttggaaataataattttccttcatagttttaaggcattttcccattgactctggcttccagagaataaatgacaggtgcagttggtcctaattgaagtaggtcagaaggtgctgagaaagacatcttgaagaagtgaaattggtaaaatacctggtacatctgaatgcattgagaggatttttaaaagatcattatttactccaacggaaaacaaaaggcatgagaagtgatcatagtttactacctggcttagctgtgttatcagttagctacaaaacaaatcaccccaggacttagtggcataaaacaataagcatttattattcagcccatgagattttgagttggcagagaggttctactgagctagactgggctcttgcatgtgtctgcagggtcagctggcagatcagctggtagagaatggcctgagctgggacaacctgtctctgctccatggggtctctcatcctccagcaggcaagtccaggcttttcctcgtggcctaagaagtgttcctttcaaggagagagacccgtctttagtcctccatttggaactggcgtgccatttggaactggcacactgtgaaargtgggcagcactgtaccctggggcttagaaacgagcccagatcatttctgctgcattctgtcagcaaaagtaaacataagccagcccagatttaaacagagcagtaaccccacctcttgaagggagaagctttactatcacacttcagagggtgaagatgtaaggacattgagtcatcaaggcagtcagcctatgcagtaatcacagcagcgtgaactctgactagtagcccaataaaaaccattcacttttgagaagccgaggtgggcagatcacttgagcccaggagtttgagactagcctgggcaaaacagcaaaatcccatctgtacaaaaaaaaattttyttttcaaaaaattagccaggcgtggtggtgtgcacctgtagtcctagctactccggaggctgaggttgaaggatcccttgagcccaggagttagaggctgcagtgagccgaggtggcaccactgcactccagtttggmcaacagagcaagaccgctgtctcaagcaaacaaacaaagccatgactattyaggaggaaaagagaatgagaaggatacatatgtgcggtaaaggtagcaagaagaaaatccacattgcccatagtgggatcaaataatgcctcaaagtgaaaaatcaaaaagccatgtaattataaccatgcaatttagagacagggcagtgagtaycaagataatgaatgaaggaaagagttgaaggtggtgacaaagggggcatgagagggtgtgtcagggaaactgcagtcttataacaagccttgtggaactttttgagcatttgacaaaaattaaaactattaaaaattaaatgatttaacttgattatattatgcatataaaagaatgagttatgcaagactatatctgatcagctccttgctgagaggagagattaggcatagattggagaaagaaggtatctgcatggctcagatagtcaaggaagacttcctgtaaaaggaagtatcagctgagacttcaaaactaggccaaaaaaaaagcacttaggcacgtttgggagtttacagttcattcttacattatttgtcttaattccacaaccaccttcttgaggtgaataaatcaggaattattgttactcttcttattttgcaaaagagaaaacagttccagggaagttgagggacttgcctgaggctccagaagcagggaatggctccaaaagttagatttcatgttcactcctttttttttttttttttttttttttttttgagacggagtcttattctgtcacccgggctggagtgcagtggtgatgtcttggctcactgcaaccwctgcctcccaggttcaagcgatcctcctgcctcagcctccctagtagctgggattataagcatgcaccaccacgcccggctaatttttgtatttttagtagaggtgggggtttcaccatgttgaccgggctggtcttgaacccccgayctcaagtgatacgcccacctcagcctccccaagtgctgggattacaggtgtgagccaccgcaactggcagattttacgtccaaatgcaacaaaggctagctgtggctaacttaaccacaaggaaattgattgggagggtatgagggagttttcaggatccaggagaagaatggaggaaaagttggggctcccaaggagcaggagtgatgaggtggcacctttaggccttacagctgctgtttcatccttgaattgcttcagtcccaggagagaggggctgatcggctgtgcctgggacctgtgcccacctctcagctaagcagggttagacaccttgatggacagcccaccaagccacctgcagtgggggcaggcagttccccatgaggaacctaaggagcttttagcagaaagaatgagaatggatgagaggcagaaaccatgggtgctcwtgccaggagcagagccagcctccacatccacactcggggctgtctgctctgaaaggtgggtagcgctgtagcctggagcttagaaacgaacctcagatcacacactttgtattcayccactgcaaaggtcattcccaggctgagatttctccagagagagaaatgcccagcatctgccaccagcacacccctccttaagggaaacccactctcctgagacacacagaccataatgtttctgcttttcagagtgaatcactgcctcagacacagctgagcccacatcaaattcctagatgggtttttttttttttgtggatatgctgtggtttcaagggggagatctccactgtgcttctggggtttcttatttaaatggaactrggtgtcattcaaagtagcagtggctgggatcaccacatgttccctgacttgcctttttagtgaccatccacacagatatctgtttgttccatgactcttggactcatgagtcagctcttctgtygggggagaatgggcagaactcacaggcagcctcaaaggctctgtataagacacctgttggtgtgatggctacagaaacacaccatcctctcatccctgggggcagggcaggtgaatgcccatgtcacagatgagaaccctgaggctcacctcgctgaagtgcctgcactaaaagcctctggaaaaggtctttcacacagggttttctgtccccctttaagggtgacgtttttagcctttcctcttcagaaggcatgaaaagcttcagccttggccggccacrgtggctcatgcctgtaatcccagcacttgggaagctgaggctggtggatcacctgaggtcaggagttcgagaccagcctggccgacatggtgaaaccccgtctctactaaaaatacaaaaattagccgagagtggtggtgtgcgcctgtaatcccagctactcaggaggctgaggcaaaagaatcacttgaacccaggagatggatattgtagtgagccgaaatcgtgccattgcactccagcctgggccacaagagcaagactccttcaaataataataataataataaagctttggcctctatcaaagacactgagagagtttggatatttgatccctgccccagtctcatgttaaattataatccccagtgctagaagtggggcctggtgggaggtgttgggatcatgggtgcggatccctcatggcttgtgagratcccacatggcttcacaatagtgagttcttgtgagatctggtcatttaaaagtgtgtggcacttctccgccactctccccctcttgctcctgcttttgccaggtgaagtacctgctcccacttggccttctgccatgaataaaagctccctgaggcctccccagaagctcagcagttgcctgtgctgtgcttrtacagcctgcagaactgtgagccaattaaacctcttttctttatagattaccctggctcagatatttctttatagcaatgcaagaatggactcacaaagatactttcgggcatgccgaggcaagcagctgaagggtcttcatagccaaatttgctcacaggtggggcctcctgcccacctcccaactgcccaccaccttacccttctcccacctgccagagggattgcttgaaaatgcaaatcaggccctgcaatgaccccctcttgctgccagggaagcagactgctcccaaggaccccctgcccagctcatcgctgccgtcttcwgccgtcttccctggccatacaggtgcctttgctcacccagggcatcaaattcccaactgtctgggcctctgcgtatgctattctgaattcttagaatattcttcatccttcttttttactcctgttattcactgggaggctcagcttttctttcataacacagttcagaagttacttcctcgagggtcccccagagtaagtcaggtcacccgtcttatgctcacgtaactctcttaactgacccatacgccaaccatcatcattgctgtgtctgtctcttgaatcccatccccttctctccagctcccccaccacctccttcatttcagcctcctccgccctctccacgggtctggacagctgcctccctgcttcccctctgcctccaccaccctcagcctattgggcagccraacaactgcttcaagaggcaaatgggattgtgccaccttctccatcctcacccggtggagaacyctgcagtgatgctcactgcccttaaggcaaactctttgccatgactttccaggccccgggcggtccagcccctgccaaccttgccaactttcaccttgatctctttcacccacccccagcactgctgcagcctcctgctcacatgcacttcccaccacagggcctttgcacacactgttgctctgcccagaacactcttcctaccctcccttagtctaaccagtgttgcctgtccagtgtggtatccttagggacgcttcccaatctttccaagttggttaaaaacctcctactgatggttcatagcaccacagtgctcatagtagcacagttgcaattatttatttctgggtgtgattatttgattatagaataacatcatcatccttcttttttttttttttttttttttttgagatggagtttcgctcttattgcccaggctggagtgcagtggtgcaatcttggctcactgcaacctccgcctggctagttcaagcgattctcctgcctcagcctctcgagtagctgggatgacaggcgcctgccaatacgcctagctaatttttgtatttttagtagagactgggtttcaccatgttggccaggctggtctcgaactcctgacctcaggtgatccacccacctcagcctcccaaagtgctgggatcataggcatgagccacygcgcccggcccaccatccttcttaaaaggctggaattgaaacctcattataacagattctgtcaatctcccctcccccattattcccgtagcactctgctcctttgggtgtgacgatgtccctctgcaggcacctgtgaccctctgcagtgcgttgggcagtgtcccagagggacagagccccagtggcccaggcattgacctgctcattgacccacccttccttcccctccactctcacgctcccactgtgtcaacagcccttcctgagatcacctcccagaaaaaccacctgcatgtgaatctttggctctgggtcagcatcctgggagacccaaactaagacatcgaggatgtatgaatgctgggactccatgattgctgctgcagggatggaaactcctcttagtagagccctgctgtgacataagtctcctggctactgaagggcggtctggcatcaccaggtagctggcagaaatgcagagtctcagaccccgctgtagactcactgaacatgcatctgcatttttttttttttttttttttgaggcagagtcttgctctgtcacccagacttcagtgcggtagtgcagtggtgtagtggtgcgatctcggctcactgcaacctctgccccctgggttcaagccattctcctgcctcagcctccccagtagctgggaccacaggcgcacgccaccacacccagctaatttttgtatttttagtaaagacggggtttcacgatggccaggctggtctcgaactcctggcctcaaatgatccgcccgcctgggccttccaaagtgctggggttacaggcatgagccaccgcacccagccaagcatctgcatttaactccatccccaggccatcctttcacacattcatctgtgaggtgagatggagccccgaattcacctggtgttggcttttcttgcagatccagaggccaggtcgagagagcatgacctgatctccacagctcctcgaccggctcctctgccctctccgttccaccacagtcctccccgattcctccgcgggtgttattacgtgattccggcttggattccggaatccagaacccagcacaggactgtagggattcaatcagatccagttggcgataggcggcttggcctgtctgttactgctttacaaactgagaagaaataaaaagaaaaagaaaaagaaaacccggttttatgacgcagcagttaaaaactatttgtagaagttgctaaggttcaaatcaaaagtgccctctctcgaggactattagttaattcagaggaccacagattctttccttttcttccttttcccccttctaccttgaaatgtagctgtaattcatttctgccgttcatacagctagagctttccatcctgtgacaaacacaagccaaagtgcttaaggacatctgtttattttatttctttaacgagaaaaccttccaatttctcctgagctcagctgtgtttatttacattttcttggtcatgtgaggcgagcaccttggaagtttaaaggcctggccagacccttgcaggagcctgtagctctgaaacggagaggaagccctgcccaaggaaaacagagtccttggaactctataaaatagattctcaaaataaatactgcctcattcacttggtagatgtggattaagtcaagatgaatacaatttgaaaaggattttctgaggaagtcggagatttctttcccccactgggggttaaaccttgtatttaaatctctcttcccccttccctctctcttttcagctgagtaaaaggtgtttagtctttgtggctaataaagaaaggatgactttgattgggctcctccagcagtgattattttctttgcagcacggctgggagaaggagagtgacctcactagtcactctgtcccatcctgtaaggagtgagggcaagaagcaaacatctgcagttgtcattttggcgggggtgggtgaggaagaagttggaacagccttgagagatgtcgcggaggtgaatgacattgtttgaggggtgttggatgggggtggtaccctttgttggcttaatcccttataatgatgcttccctaagccagggaccttcatgccaagtacccccgcttatgtattttacagcattaaaggattatttccaacataaaatatattttaaagatggtttggggttgtcagaaaagtgctcattagcagagactttctttgaagccctgtgctctcggccgctttgagagagaccatttccttatagaatcactcaacttgggttgagagttctgagcgagttaagtctcctgactatgcctaattttccgcccacagatttaacaaacacagactgcttccccagacttccttcgccaacttcccccgctttcttgccccacctctcagtgaatgctgaagggcatctgaaaggaaagaaaaaggagagggatttaaatcctccatgcaaaacctacaacaaattgtcagctgggttggagtaagaagctcctttgtcttctgtaaatatagagcttgctgctcacgatgataagtgctgaaaaaaatcccaggcactctgggaacctacataatgggaacaattttcctttacacttaactagcaggttgagaagccgtctcccctccaactactcacctgcactttttacactacttatttcccaacaatagtgttcttccagcgtccaaagattgctggtgatgaggtgtcacctgctaaacggcaggaaggtgtcaacgccattgtatttggggttgactttgacagggaaataggaggtgtcccctcaccatgcctgcttcccacacttcctctgtgaattcgtgaactttcaggcccctccgatggcagatggggaaaagctccaatggatgtctcccagtggggcctaattcaaagcagaaatatgcagtctcggagtggaaatgaccatcaatggatgaatggataaatcataggatagtcatactcgtggaatatgattcagctatgaaaaggaatggggtactgatacatgctacaacacacttatgtcaagtgaaagaagccagatacagaaggtcatatttgtatgactgtttatatgaaatacccagaagaggtcaatccttagagccagaatgaagactgttggttactagggactgggggtagtggggaatggggagtaagtgcttcttgggtacagagtttccttttagggtgatgaaaatgttttggacctaggtggaggtggtgggtgcacaacattgtaccctagattccactgaagtgttcactttaaagtggttcattttcacacctgtaatcccagcatttcaggaggctgaggtgagagratagcttgagcttaggagtttgagaccagcctgggcaacatagtaagagcttgtcgctacagaaagaaaaataagtaaaataggccgggcacagtggctcatgcctgtaatcccagcactttgggaggccaaggcgggcggatcacctgaggtcaggagttgagaccagcctggccaacatggtgaaaccccgtctatactaaaagtacaaaaattagccggggcatggtggcacgcacctgtagacccagctactcaggagactgaggcagaagaattgtttgaatccaggaggcagaggttgcagtgagccaagattgtgccattgcactccagcctggatgacagagcaagactccgcctcaaaaaaaaaattaaataaaatagccaggcatggtggcgtgtgcctgtggtcccagctactcaggaggctgaggtgggaggatcgcttgagcccaggagttcaaggctgtggtgagctatgatcgcaccactgcactccagcctgggcaacagagtgagaccccatctcaaaaaaaagggtttattttcagtgctatggattttacctaaattttttaaaaagaaagaaagaaagaatctccttgggtagtcacgttttgttagaccgctgagcccaggcttggtcttggtatgtgctgccatagcccgtgtgcccaatgcggtggggaagtcgcttcttgccatggtgtctgttgtgacatttctgactggaatcctgccgggtgatgtgacactgtggagtctaaaggtcccagatcaaatcccatccccaccacttcctggaacaagtcagttttttcctaaggtctcagtctgtaaaattggaacagcagttcttgccctactgacctcataagacaagcccgagaatgattctgtttcccaaagggcactgagagtgctctggaaggaacgcacacggtctggagatasctaaagatgaatattttttacttggaaattcagataggactttttgttagttcttgagtttgaattttatactgtcatcatctggttttggtgtccagataatactggcctcatcgaatgggttggaagtgttccctcctcattagtttcttgaagagattgtggagaattggtgctaattcttttggaatatttgatagcattctcccctggaaccatctagcccttgcagttcttttttgttttctgggaggcttttaattaggaattcaagtttgttgttgttgttgttgttgttgttgggttttctttgagacagagtctttctctgttgcccaggttggagtgcagtggcacaacctcagctcactgcaacctccacctcctgggttcaagctattctgcctcagcctgcggagtagctgggtctacaggcacccgccgccacactcagctaatttttgtatttttagttgagacagagtttcaccatgtttggccaggcttgtctcgaactcctgacctcaagtgatccacccaccytggcctcccaaagtgctggaattacacgcatgagccaccgtgccccgccrgaattcaatgttttcgtaggggtagttatttcatcttgggtgagtttgggtagtttatggtcttcaaggaattgattcatttcattcgttgtcaaatttgtatgtgtacagctaaaaaacaaaattgaagtatctacttttatgatgactttcagtttgtagcatataatccataatcagaaacctacagtaggcaggaggatcactcgagtccaggagtttgagaccaccctggacaacatagatcctgtctctacaattaaaaataaaataaatctctctccccatgcatagcactgggtcagatcctttgcatgggtcatctccttggtcttcaacacgaacctgcaagctaaacatagtaatccccattcaacccagaaggacacaagctctgcccaagactaccacgctgggaagtggcagagaagggatcagacccagaactccaaaggccattctaaacccaactgagctgaccaaggccccaagttccctggcccagccctcaaacttgccctccaaccccagctccttcctcggccagacatcacactgagggcatctgcaggccacacctggcccttaaacatatcctttttattacttttaaaatttgttgccagcatttaaaatcaggatatttcacatacaaatccagctttctggtttcttttgaaaaatcagaagatctgggcatgctgcacccacaatcccaaatggcatcacttggctgcagctgcccagaaaccaccccctataaatggctcaggtgttcagtttgccacagtcccctcattccctatcatctccctaacattaatgtcatcatgtttcattttcttcataacatttgtcactctctgaaatgaaatgtttcttagttattttcttggttttttttttttttttttttttgagatggagtcttattctgtcgcctaggctggagtgcagtggcacgatctcagctcactgcaagctctgcctgctgggttcatgccattctcctgcctcagcctcccaagtagctgggtctacaggcacccgccaccgcacccggctaattttttttttgtattttttagtagagatggggtttcaccgtgttagccagggtggtctcgatctcctgacctcgtgatccacctatctcggcctcccaaagtgctgggattacaggcgtgtttcttagttttttatgcccttctctgccattagaatataagctccttgaggcaagggactttcgatatctgagagcaaggagacagcattgcaaagtggtcaagagcagaggtcagcaaactacatccatcctatgggccaaatctgctccctccccactcccccagcttgtttttttaaataaagttttattgtaacagtcacacccattcgtttacatcttgtctatgtctgcttttgtgctaccgcagcagagttgaatagttatgatggaaaccatatgggccacagagcctaaaatatatgctttccaaacctttatagaaaaagttcaccacccctggtctcaagagccagactactcagatccaaagacagctccacttcctagccatgtgacctcagacaagtcactttgccttcctgtgcctcagttttcacctctgtagcatggatgtaataacaataatactcaccttatagggtcactggrggaggattacatgagttaatacatgtcgagtgtttggagctgtacctcctatgtagtaaagagtttttgtagataagcaaatgacacttttttttttaattgacagataataattgtacacattcrtggggtacatggtgatgtttcgatgcatataaagtataatgatcagatcagggtaattaacatatccaccatcrcaaacatttctcatttctttgtgttgggaatgtttaatatcctccttctagctatttgaaactatatattattattaaaatattgtcatgagtggggcaaggtcagatataaccaggtccacgcacgtttatgtctttccacaaggtcaggctttcactgatgctatttcagttatgaaagccactagctagaggaagacaagagaatgacctgtctggagttcccaaggaggcaattctccttaatattaccctttcacttggtagtcagggccatgagcacaaaaggctgaaaccactccacaagtcagtcaatattgcaaaccatacataatagtatacttaattgatatataaatgttatagattagaatttcatgccaaacagcaacattaggcatcaagaataaaggggatatgaaaagggactaacgggctgggtacggtgrctcacgcctgtaatcccagcactttgggaggccgaggcaggcagatcacttgaggtcaagagttcaagaccagcctggccaacatggtgaaacccccgtctctactaaaaatacaaaaattagacagacctggtggcacacacctgtaatcccagctacttgggagactgaggcaggagaatcacttgaacccaagaggcagaggttgcagtgtgccaagtgcactccagcctgggtgacagagtgagattccatctcaaaaaaaaaaaaaggtgggggagtggggggcctaatgaaccagtccaaggagagtgacatgtagaaggagagagtcctgatccgggcacttgccagtatcttccaagagtcctttatttgggcagagccttcagcttcaaattctgggtgctgatgacaagtgacagtgagacagaatgtgttaagatgtcaagctggtgaggtcctgctcattttatgacccttgagtcctctggtgaggactggtggtaaagggttacacccttatctggttgggtgttgtctctattgattaggtagacatctggactcttgttgacttgatgacttttaaaatgtaagatggagtctttttctaagatggagtcacttatgtcaagggtgtgctatacatatagtatcttttaaagagctgcatctttagaagcacattgctggttatgtaagatgttctatctgaggaagtgtgctgaagtgtgackactactaataataagcagaaagcacgtggtgttgatggggatgttgtcaatgctgatggcagcagcgggcacttgctgggcatcaaaccctgttctgagtccttggaatgactttccataaacaaacccatctcccatgtcaccacatgcccctcagccctgggcagtgactcctgttagggtgatcatctcatccaggtttgtctgtgactttcccacttgtagcactggaagtcccaagacccaggaaacccctcaatcccaggcaaatcaggagagttggtcactctactccatatccacaatccattttatctatttatttgttatttttgcctttaaatttatatcctagaaaaatactttaaaagctgctagacatgtccagctgaaagaacattcttcaaagattaaaaaaaaaaaaattctaagaggctgaatagttgcacaaaaccccaaaagaggaaccggtttcaacatctttctttgttctcttaaatttgaccatgatttcatcatttgtcatgagtttgactcttgtgattcagcgatgatggaatgtatcctacagtcttttggttaagttttttttttttttttttttttttgagacagagtcttgctctgttgcccaggctggagtgcagtggcactatctcggctcactgcaagctccacctcctgggttcacgccattctcctgccttagcctcccgagtagctgggactacaggcacctgccactatgcccggctaattttttttgtatttttagtagagatggggtttcactgtattagccaggatggtcttgatctcctgacctcgtgatccgcccgcctcggcctcccaaagtgctgggattacaggtgtgagccacctgcctggccagttaagttcttgttagtacagatagacccattatcttttctatttttggtgttctcccacaaaactgtcgaagaagccaagtttttttttaactttactgtttaaacatgtgaatcaacttattttttctttatcagcatcattttcttgtcttcctctaaaaaaaatttttttaaacaagctgatctgccttccaaaagtttccaagtaattaaacccaattaaaaccattaaattctttcttttaatgacaactttattattaaaagctaaccacaaggaggagatttaactggcaaagctctctgttgtgtgttaatscattcctgacctctggctgacacttccaagagataaaccccacagaatagggagctggtttaatgaacagctttaattaatacttttcttccttgtggcagagtaattatttgttcaacttgtaaacagctccttggcggtgattttttaaagacccagttggcttggatagtgtgatggttttgatgtgttttgtgtgtttgtgtgtgtttttttttctttaaaagagagaggggaggagatctccattccaggattggtgctgaagcacatgtgtcctgaagttcaggacgtcagggtaattgacacagaagaaaagtgaggcgaaggcaggcagcaagctgcctgtatttttgagacatctccagagagggcaggtctgcagacgggcaggtctgcactttgcagcaacagtctgcaagcccagacaaggcccccaaggagacacaagcccagcccaaatgcagtctgagtgttaagaaaggaaagggcctgggattgcaaagcgcgaggccaaacgcctcccccgaccttcccttcgcgtggcacctgagaaaggggcagcccagtgcaaatgctaggtgtgaccaaccaggccccggagaagcgattctgtgaacaaggatgactagcccgctagtagtgcttgccgcaagccgcccatgcatcccaagtgctttccacccatcacctccctaacctgtctcagggaggtagatgccgtgggttttcgtgaggttaagtggcctgtcccaagtcacgtaccttctagcaataagggcagagcgcagattgcagccagctgtctggctgcaggagtcagtcctaactactgggcagagctgccccttgagacaagaaagtggcacctcccactcagctggcggggagagacttaggtttgttttttttcatttagttcatctcttagttagaaagctggtttcattaacaagttagaaagttagtttcattgcccactctgtaattccaaasttaatttactaacactaaggaccaagctttktcattattttaaaaatcatttagaggagtgattctcaactaggggtgatcttgtccctcagaggacatttggtgacgtctggagacatttttgactgtcacaactgggtaggcgtgctactgaatttagtgggtagaggccacggatgctgctcaaattcctacaacccacaggatggaactacaacgtggaattatctggctcaaaatgccaacagtgccaaagcggaaaaaccctgatttgtagaatcctcaaatgtttcattcttatataattactcagacttttcattcttgtagaatgctcaaatgctcactctagaagcaatttgtaaacacacaaaagcaatattaatgcacccatcagtccccaccccaccccctcaaaattaggctgaatctcttataaaaaaaaaagttaattaattaacttagtgaatttgttaaccaggccaccagaaattcttcagaaacacatctaaagtgccactaactgttctcaactgaacagttagttacggatgaaattgttagtacaagaatatttgaagacagtccccaaattcccaaacatctacctctacttattatgcaagtttccttaagaaaatgcttatgtggccaagctcggtggctcatgcttgtaatcccagcactttggaaggccgaggcgagaggatcacctgaggtcaggagttcgagaccagcctggccaacatggtgaaatcccatctctactaaaaataccaaaattagccagctgtagtggcacacacctgtaatcccagctactcaggaggctgaggcaggagaatcacttgaacccgggaagcagaggttacagtgagccaagataacaaaaaagaaaagaaaatatgtatgaagagcacaaagcagattaactaatttcaccctctgagcctccttgggctgagggatgtgttcagagatctctgatgcctctttggggctcccaagactctcctccccaagggctcagagctgtgtctgaagctggaaagataagcagacagtcctggagggcttaatcctgggactgggttgagtccaatgcttaagatgtcagaattcaagcttsttagagcaagggccgtaggcttcgtgtttctatctggaaggactgaccgtggcatcccacctgcaagacccttgacaagagcgaaacagacagctagcgttgctgacagaccaagacattattcagagagtgttgctgttttctgaaaattatctttggatatgttgcatttgataagattaatggatctaaagaggccctaaagttaatcttttcacaaacacacctgtttttgactcctagggtgacatcctagaaagacatgggctacaagtaagtgaggggaaaggctgggagcagagagagatggttctgagcccttcgggggcagstaaaatgagctgatttccaatcgcggccaaggtgtctggttcccgcagagccattcccggcctttggcaggcagcaaatggcagctgacaaggaagggattttccagttagctttgccttttcatatcaagtccaggaaattaaagacacacatactccacagcaataaggggagacggtttcccaccctgtgggctctccttttgtcccctccaaagaccagcattgcagttatcagagaggaaagccagcctgagacctgagaaaagaatcagggctgatttttaggtggcagctgcctgccgtttctcctcactttggaagtgtaattgtcattaaacatgttgtttgtttcattaaaagtagacatcaacagttacaaatcaggcatttacgaaaaaaaaaaaaatctggtggttatctgccctaagcttttttttcctaataaatcatttcattttatgttactagttcccatgaagatatatttatgagtaaaatggttaagattttggattcttgagttagacagtcctagatttgaatcccagctctgccacttattggcagcgtgaccttggacaagtcacttcatcagtctgagttttgatttatctgtaaaacagggaaaagatattttgaggaggaaatgggataatgtacacaaagttcacacatattcatatattcatttaaaataaaaaaatggccaggcacggtggctcatgcccataatcccagcattttgggaggccgaggtgggtggatcasttgaggccagaagtttgagacaagcctggccaacatggtgaaaccctgtcttcattaaaaaatacaaaaattakccgagcatggtggcatgtgcccatagtcccagctactyaggaggctgaggcaggagaatcacctgaacccaggaggcggaggttgcagtgagccaagatcatgccactgcactccagcctgggtaacacagcaagactcttgtctcaaaaaaagaaaataaattaaccaagcatctgccattcaagctctgatctaggtatgagggacacagtaatagctcccatggagtttgcctcctacttagaggagaagcacaaaaaattataaataaataaataagagcatttcagtcaatgataaatgctgtttaaaactgcaacagagtaatgggatgtggagtgagtggggaggagtatgttagtttatttcatagggaatggtcagagaagacctttctggcattgaaagtgggaatggaatgttacaaaggatccagccctgaaagagcctgggaagaggggatttcaggctgaggaacagcatgtgcaaaggccctgaggcaggagcaagtttggcagattcaaggcagagtggaagagtaggtggttactagagcacatgaggccactagaagacggtggctttactcagagggccaggggaagccagtgggttttaagtgaaaagcacagctctgatwgttgttttaaaaagagcactctggctgctgtgtggacaacagacatgggggacaagggaggctagctgcctttatagtggcccagcacacagaggggctccttgtcttcctccctcaccgcccccctctcttggtgatggactgaaggtgccttggaaataagataaatgacaacatgcaaataaagtgctgagcgcaggagcaggtgcatagtagaccatccaaccagcaaagctctgataagaattattattttggggaactatctcttaatcccttgctccttggaaaacctggaagaaatcaggcaattggggtataaggaccaggtgaagtgctagagccctcaggtcaggggagcagttgtgccccccaccccagtcacatgcatgtccccctccaacccccaccacggatcagatcaaatgaggatggctagcatcagggtctgagtcactgccttagctgccagtttttcctaaagcagatttcaaccttgaaataaatctcttaaaatgccttttttatgatcccaaaatgaaaaccccaaataatatagctgaccactcactactttaaaaaaaatgaatgtagtatcctaactgtaacttaacggaaagaaataaaagaaggtttattttctttttttttttttttttttttgagacagagtcttgctctgtagcccaggtgggagtgcagtggcacaatctcggctcactgcaagctccgcctcccaggttcacgccattctcctgcctcagcctcccgagtagctgggactacaggcgcccgccatcacgccccgctaatttttttgtatttttagtagaggcagggtttcaccatgtcagccaggatggtctcgatctcctgacctcgtgatccacccgcctcggcctcccaaagtgctgggattacaagcgtgagccaccgcgcccggccgagaaggtttattttctaaaaatatgtatttcagtatgtaaatgctcaaacatgaccgcaatagaagacatgacaaaggagtctgatactaccacccacttctcatttaaaaggttgcatttcagagaactaggaagatctggggctcttctctactagaagtaaaggaaaatggaagaacagagatgggatggaccatgggatacaaacaagtatattcagtatttatcaaaaccatgcaaagcccgggcgaggtggctcatgcctataatcccaacactttgggaggccaaggtaggcagatcacctgaggtcaggagttcaagaccagcctggccaacatggtgaaaccccatctctactaaaaatacaagaattagccagtgtagtggcgggtgcctgtaatcccagctactcagggggctgaggcaggagaatcacttgagcccaggaggtggaggttgcagtgagctgagactgcgccattgcactccagcctgggctacaagagcgaaactccatctcaagaaaaaaaaaatcaaaaatactctatgtttacttctataaaggagttagattctaggctcagatcattagaaacaggtttttcacaacrtgagtgttcatcaggagatatgaaagtcacatgggttgtgggacaatttttctttctgtacaacttcctacagtgcattagaagacattaatatccttggcacccccaaataccactatccctctcaactattacaacgaacaaaatgcttcccccacaaatttccaaaccactgtctaggcggaggtgccacacctgccgagaaccactgccctaaaacagattcatggatgatatactcaaaataaccgcatttggcaattktataattgcatgctgtggtgggcagamaaatggcaccccaaagacgtccacatcctagtccccagaatctgtggctgttaaccttctatggccaaagggactttgcagctgtgattatgtgtccctaatgtaatcagaagggtttttataaaagggagggtggtcaaagtgggcggtaggagatgtgaggccagaagcaagatattggagtgacatgaggaaggggccatgagcccaggaatgcaggtggcctctagcagctaacacaagcaaggaaacagtcttctcctctgaagccttcaaaggaacgcagccctgcagacacctctcatctctagaactattagagaataagtgtacattgtttaaagccactaagtttgtgctaatgtgttatggcagccacrggaaactatattacatgtgtttatattcatggtgacttyccatttatggtgactacaccaggttttctatttatgatcatgataacaagtttctttctaaactaaaatgcacttagattttgtttttgtctttgaaacagggtctcactctgttgcccaggctggagtgcagtagcgcaatcatagttcactgtcacctcaacctcccaggcttgagcaatcctcctgctaggactgtaggcacacaccaccacgcccagctaattttttaattttttgtagagatgaagtcttactatgttgtccaagctggtcttcagttcctgggctcaagcgatcctcctgcctcagcctcccaaagcactagattatgagcgtgagccaccatgcccccagcgaggtgttttagaaggagggagtagccaaattaaaggaaaatattaagttaataataacacagctactctgtagcttggcagaacttgcaaaggtgttccaagaatggccctagtttggaaaataacaggttaaactatcgcatgggaatttctcagcgggagaagtcttctgttggaagcttctgaatgctgctgctttttgttagtaatacctaggcaccaggtgttttgcaagacacaccacacacaaatcctcaggagccctggaaaggactcactgcttatgttcagctgaagaaactgaggcccagggagagtgaacatctccttcaaggtgatgtacctggggaatggcagtcccaggatttgaacctgggtcctgccaactccatgggtgatgctctcaaccactttgcttcatggagattcttgtctatggccacattcatggataccttgtgaatgatggaggcaatttgtggtggccatttgggtgagtcccttgccccattaggcaatgcttgtataagrgagaggttactcttttcagactacataataacccaggcccttccatggacttggcttaaatcaccttggggtgrgggtagcaagaggtgccatcagaagagaagacagtctttccaaagtgcttcctggcaaagctcgaccattgctaagatgtaaagaaacacttgggcttgctcagcaggccttgtctatgcygcaaacacccgtttttgcttggaattggcacgttgcatgctgagttaagaatcttttgattataagcgacagaaattcaatgcacrtcagcttaggccaaaaaggagaatttgttcatgtcaccaagatgtccaaacgtagacctaaagcaaggtgggatccagctccctawatattttcatatgaatctgtgtgcactgtcaggaaggctctgcctgtagggtgacagagatggctgccggcatccttgagcctagatctaccagctcarccaccccaggraaaaaaggtgcctctcccaggagtcatagctaaagtcctcaggccaatgcccattggctcataatcatccttgaatcaatcactatgattctagccagggatgggttatgagatcaccctgaaagaccsataatgggtgttatttttactaaaaattattaactgctaatttacggatgtgactgctcattctcagagagattgggtatctccacaatagcatgctgcctcctttgctaaccggttgttttttgaaggtgtctaataaagacactgtgttgggaatccccaagaccaccttcggcctcaatgattgactagaactcacaaggctcagagaagctgttagactcacagttacagttattacagtaaaaggacacagattaaaatctgcaaggggaagaggcacatggggtgaaatccaggaaagaccaggcacaatcttycgggagtcctctcccaggggagcacggacactccacctaattctcccagcaacaatgtgtgcgaacacatgccaagtgttgccaaccagggaagcccacttgagccttgatgtccagggtcttattgggggtcagtgacataggcatgcgacacctaagtaactgacctcagccactcagacaccagcaccccagagcaaaaatagrcattcaccataaactacattcttagcctaaactatctcaagtggaagtgcatggtgtggcccaagggcttggagctcatgcaccaggaactggccaagggccagccctgaagacagacatttcttaaggaatgtgcagggtttgagcaacccaggcctgctgagttaaccctttcctgcacagccagcctctaaatctttatagcagaccccaaatgaaatcagctaaatggctcttcccaaktaaagaccaccagatagcgtagatgtctggtgcacttggagattccacagaggggacagcacatcccttctgcccagtcatgcagctgarccatggaaggcagacgctccctcagagcaaaaaagccatgacaggggtggtggcctaaccagaggattatggagtctggagtcagaktagacctgagttcagtgccaacactttctcttacaagctaagcaacattgaacaagctacacagtaataatagtaacagtaatagcaatataaacagtagctattattaagctaacatttattcagaccttgctatgttccaggcatggttttaagcacttaaacagtcattaatttattgtttttaattttttttacatggtcacagtaagaaatacattttacmctataacccaccacatacacacacacacamaaacacacacacaccccaactggaataggtgttcaccattgctgtgtatgatagattctgatagttcgttgtctattgtaggaattaacaaacttttcctataaagggataataaatatttyaggatttcagctaggtcctgtggtgactactcaactatgccattgtaccatgaaaacagccataaataaacattaagtgatcaaatgggcactgctaggttccaacaaaactttatttacaaaaacagacaacgggccgggtgcagtggctcacgcctgtaatcccagcactttgggaggctgaggcgggcggatcatgaggtcaggagatcaagaccatcctggctaacgtggtgaaaccccgtctctactaaaaatacaaaaaattagccgggcgtggtggcgggcacctgtagtcccagctacttgggaggctgaggcacaagaatggcgtgaacccaggaggcggagcttgcagtgagccgagatcacgccactgtactccagcctgggcgacagagcgagactccatatcaaaaaaaaaaaaaaaaaaaaaaacagacaacaggccatagttccatagtttgctgactcctgggttctattatatttcttccagtcttttttttaatgctgttcattaaactttcactaaaaggattataacctgcacttttacaaaaacgtatttaawctttacaacaatcctatcaggtatataagcccattttacagatgagaaactgagacacactgaagttaagtaacttgtaagaagtggaactggccttgatcagaggtagtctggcttagagcccaccttcttcacctgtacaacaaagcactcactagagattggccattatcattatcaacattattattaattattattattattattattcagccaggagttaagttatgaaggaactcatatttgaattatgaaggaactcaaaatcccacagtcacataaaccagtttcaggatgaaatcggcatgccttccttttgttcaaagggttgtacagctaattagtatgtaaatctcacttctttgaattgaacacattttagagtcatctattacaaaagtgctgcatgcttgaaacagaaagcttgcaaaatctgtaatctcagcactttgtgaggctgaggcaggaggatcacttgaggccaagaattcaataccagcctgggcaacataaggagaccctgtctctacaaaaaaaaaaaaaaaaaaaaaacaacaaacaaamaaaaaactaattaattaattaattagctaggtatggtggtgcaagcctataatcctagctactcaggaggctgaggtgtgaggatcaagaagatcaaggctgcagtgagctatggtcatgccactgcactccagcctgggtgacataggtagtagacctgtctcaaaaaagaaaagaaagaaacagaaaacttggaaaatccaggaaaaaaagtctttaatggatagagttctgattcattaaaacaattttttggtaaaaatctatatgtgttattttgaaatgagaacagttacctcctaatctatgtggactgggaagtagacttacaatacggcataaattggagagctgataaatttgaggatggtagagacacttgatagaaaacaactgtttagtcttaattaactatgaataactttggcattcacgttttgaaactcattcatgtttgctttacatcagattaattttattttaagaaagatttttgtatactcttatcctctccctttcatccaagaaatacaaccatacatcccaagatagtgatccacgaggcagatctttggrccgcctacgtggtgaaaggccccaccaacctcctataattcagagaactttgcctgtaattccagcactttgggaggctgaggcaagaggatcacttgaaccaaggagtttgagattaccctgggccacatagcaagaccctgtctctacacaaaataaaatataagccaggtgtgctagcacacgtctctagtcctagctacttgggaggctgaggcaggaggactgtttgagtccaggagttcaaggctgcattgagctatggtcacaccactgcaccccagcctgggtgacasgggagaccctgtctcaaaaaaaaaaaaaaaagaacttcatcaagaatgcataatagttatattactgagctgccatccaggtccatagcctctctcctgaagggcagttccaactcgaaacctcttcaccagcctcccacacaagtatgcagagcccaccacaccatcataaaaactgaacccggagaaatctgtagaacattagggcacgctaagaaaatctacagcgtctttgtctgatccgtaccttcgcctcaagagaaccacccacaagttctctagtcaaacaaagatgacattccatccacccccaccccttagcccccagcatggtccttcccaggatgagttacacattgaagcctgttttggaaaaactacctcctctcagttcattctggtttaaattgattttttttaaagtaatccacttatgctgttgcttgtttaggaaattaaccactgttgttttttgttttttaatccaaagaatatgtaatgcttcagaaaatgggtttcatgtaagtggcatgttaaaagcttttgtaccaactgatgtggggtcttcctgctgggttcgcagaaacgattctttgcttaaaggctcaaggaaggggactgggggattttgacaataaccaatgcttgtggagtgcctgctgcagyccaggcctgggctaggtgcttccacacgtgctgtctgatttaatcctcactgcaatgttaggtctyagagggatcaggctggacttgaaggggtcagtggcccgaaagagcrtggtgtgaaagctgyctattttaggctttatttgactgggagaagttctgggtcagacagagggttgcctccaagctgtcctctgtgactaaagtcaagacaccaggatggaatatttatggtktatagtagggctgcattcagcaggcagcccaggatgaaactgatggcttttgtcttgtcctcactccagatgtatttcacataaattaatactgagtcaccaccaaatttttttttcttttagtttcttgctctctgcaaccctggaaaaacatttcctacttggataaactatgcagccataaaaaatgatgggtycatgtcctttgtagggacatggatgaaattggaaatcatcattctcagtaaactatcgcaagaacaaaaaactaaacagcgcgtattctcactcataggtgggaattgaacaatgagaacacatggacacaggaaggggaacatcacactctggggactgttgtggggtgtggggagrggggagggatagctttaggagatatacctaatgctaaatgacgagttaatgggtgcagcacaccagcatggcacatgtatacatatgtaactaacctgcacattgtgcacatgtaccctaaaacttaaagtataataataataaamtaaaaattaaaaaaaaaaaagtgttctgacccagggcaacactgtgttacttgactcctgagttagccttgcttttctgaggctattccagacttttctgcctctgtgcaactagtttttatcgtgttttttgaacagaggtaccacctacatagcttaaaacaatcttaggaaaatctgaaataataagaatgctccaagagtaggtgggtattctaaaggctcatcatataaacatttgggtgtcttcaatytttagaaaaatgtttaattacatgataagtatttgaatcccttctcttttaaaaaattctagaaggctgggcatggtggctcacgcctgtaatcctagcactttgggaggccgaggtgggtggatcgcttgagctcaggagtttgagaccagcctgggcaacatggtgaaacccctgtctctacaaaaaaaaatacaaaaaaattagccaggcgtggtggtgcacacctgtagtcccaattacttgggggctgaggcaggaggatcacttgaacctgggaggtcgaggctgcagtgagccaagattgtgccactctactctgggtgacaaagtgagaccctgtctcaaaaaaaaaaaaaatctagaatattctagataatactgaagttcactttgaccatcacttttaattcctgttccttcctctctgccttctagaagtaactgcctttctttttgtgtacagcctttcagatatgtataaatatgtaagtgcacatggaaaatatagtaacattttatgtgtctctaataaacggtaataacatacagtacatagtacataatgcaatcagaaaactttttttcactccagtgtattttttgatgtgtccctgttaatacatggagatctggtgcatttccttccattgaaatttcatttcccattgtatgaatagaccacatttcatttttcaagtctgctttgaagtgatagctaaattattcccaatcttttgctatttactaacaattctgtaatgaacatcttcgatatgtccccttgctcatgtgtatgagattttctgtaggatagataatgaaaagtggaattactgagtatgttgcctgttatttttaaattgttaatccaagaaatatatgcctatagtttaatattcatagttctacaaaggaatatatatggaaaacagcagtcctcagtgactgcccaccacccttttttcctgcccaggggcaacaactcttgctgctgcctttaaaaatgtaacctccaaattatttttattttattttatttttttggtacggagtttcactcttgttkcccaggctggagtgcagtggcacaatctcggctcaccacaacctcctcctcctgggttcaagcaattctgcctcagcctcccgaatagctgggattacaggcatgcgccaccacacccggctaatttttgtacttttagtggagacggsgtttctccatgttggtcaggctggtctcgaactcctgacctcaaatgatctacccgcctcggcctcccaaagcactggattacaggtgtgagccactgcacccagcctcactcccaaatttctaagtaacatccttaggtgctacttcttgattctttttttccccccattgtaggcatgatctctggcttcccaaaatatactaattgagctctcttttctcacccttgaccccaacacacacatgcaaactttctcttcatgtcttcccagtatcagtcaatcataacttgagctttaccaatatgcggtatttgccttcttacaactatataaatactcttcacagagaagtcatttggtatgcartaattacttttccttctctgtgtgctggcctgggaggtgacawctttcagaataaatcctttcagcaaacaagtctgggtggcagctccttcttgcttcttgtccagtacatggagggttggtaatcagtgattaggtgcacraattgctccgtcaaagaggagtgtgtgattgtgcagaggtgaaatgctttggatatgagtaatgcaaaaccttttcccaggtcacacacgattccctcctaggccctragaagtttgttttcctcatttgctcttcatttttcactgagtaccctgccccatcgacttccagccaggaccaagagtgctaagctttggctctcggggccttgatgaagtgttttgcctaatggctgtgttcctgggcctgattcttcacagttgtgtgtgtgaagctgagatcaccagctgcatttttttctttctttttttttaagggtcaaraarggtttatgtccttaattatttatttttataatagaaataatatagcctccagtgaaaaatttaaacaggaaaaggactgtatggagcaaggggacaaggcccctgtygctcctctcccaactcagcccctttgagtcctcagaagcagtgttgttccagaaccagattacctatgttctaatctcagcatttgttagcttgtatggccttgaacaagttgcctaacctttgtatgcctccattttctcatctataaaatgggtgttttagtccatttagtgttgctataatagagtacctgaggctggataatttataaagaaaaggggtttatttgacttatgattctggggrtcggcaagttcaagattgggtagctgtacctggtgagggcctcaagctgcttccattcatggtggaaagtggaaggggagtcaacgtgtgcaaagatcacatggggagagaggaagtcaactcttttaacaactcacactcttggaaactaatctattcctgagagactgagaattcactgactctcatgggaaggcattaatctattcatgacccaaacacctcctactaggccttacctcccaacactgccacattggagatcaaatttcaacacgagttgtgacaggaacaaaccaaatccaaaccatagcaatggaaaaataatagtgttcacctcacagagtttggtggggattaaatgagttaatacttataaagtggcacagagaaagcacttcatagatattagccaggaatattagccaggaatattattaacagtgtgttttatatcctyctagactagtggttcttaaccttgactgcatattgaaatctagactagtggttcttaaccttgactgcatattgaaatcacctggggagctttaaacttcttggtgcctggaccctgctgtcagcaattctgattttattggtctggagagcagcctgggcatcaggatttttaaaggcttctcagagcatcacaatatgtatccaggggtggaaaccattgtgctgcatattttccatgtgtatcggttaggataggtaagggcatgctgcagtaacaaacatccccaaaatctcatctacttctcatttatgatacatgtccattgtggtcagctgtatctctgatccacatcatctttattctggaacccaagccaacagaatatgtgtgggcattggtgaacatagctgccttccaggctaacagaataaatatccagaatacttgcagccttgtgaagtgagaaaagagagtgcatggggaartgtgcactggctcctaaaaacttctgatcaaaagtgaaacataacttttgcccacatatcactggccaaagcaagttgcatggtccaatttctaagtaacatgcgtatgtgctccttcttgtagcacatacaagaagtatgttttttcagttgtaggtatgatctcttgcttcccaaaatagaagaattgagctctcttttctcacccttgaccccatcacacatatgcaaacgttctcttcatgtcctcccaatattaatcaatcataacctgaattgaacagggagggtatgtgtcagcggctggatggtaaatattttaggctttgtgggacacacagtctactcacctctgactttgtagtacagtgtagacaatacactgattttctaaaaaaatgtaaaaaccattcttaactcattagtcatacaaaaacaagcagcaggccaggtatggcgtgggggctgcagcttgccaacccctgctacatgtcctccttttgcagggagaagcacctcagggagggaccccaaatatgggtgaacagcagtacagtctaccacactgtgtatacagaaaggaggcactttcattgcacaagtgtgcaaattcatacgttatgctgtgttgcagcttgcttttgttacttagtrctgtatctcttgatgacagtttcatatcagtaactccagaatgacttcgtttgtataatggctgcctagttttccctcctatgaatgtaccatagtgcctttgtgtttgtgtgtttttatcattaaccctctattgttggataacagggatttttttaaatatcaagaggagggagtaaggcagtgtgcctagagagattgttggagagagagactcaacatcccaactctcccagtagtttatactgaaatcttccagacctccctgaaaacaaaaatgtgttgggggcaacccctgaaaacatgcatttgccaggaggccctgttttattacagccatatcatatctgtgataagtgtccttgcaacgctgaacactgttgcaatcccagggtcattttccaggagatttaaatactggaaagggtaaaaagaaatggtgaaaactrgaagtgagatcccggaagctgtacaacatgattatcacaccrgcctcacacagagactcattttaggccacgcgtgagccgagcagatgaggaaaaaccaaaactgcttttcrgcagtggaatgggaccaaaagggtagctaagattcctcaggctcygcgtgcatgtgattttccccttctctgcctcgcaggacaccacgacgtccgtgcgcattggccttatgatggaagagatgatcttcaaccttgcagatacacatctgttcttcaatgacctggaggtttgtggttgctgatttcatttaatatttgccatgtttaatcacctgcatctagtttatgggaagaaggatgctgcctttcctttctttttctttttctttttttctcctttttcttttagaagcttgaaacttttgctaacaacccccaaaaaggcccaaaactgtggccggtgatggtttattggaaacacacttagctcaattatctccctagctttcctgtgcagttaacgggctcttctctgttccagtggtagtgtccactggcagttttactaatccaataatggctatgtagtttcttcctcctgaaatttgctatttaataagtttattaaggcaaattagtacagatcctcctgggtcagtaataattagcagtggcccagggtggaagcttttaaaaacaatttacattcccctgaaagcatgttttataaagagaaagagtgagagtgagcagagggaatatgcttatttaaagtatctgctcctgagcccgtaagcaagatccaagggagatagggaaaaaagcgggagagcagcttcaaaaataaattgaattcatttgtttatacccagcctatgtcagaaaggatttcgaatgggaaacatatttagaatagaactagtaacacaaaggcaagcggaagcaaagctatgtcatgaataagggtaagacattgcacaaaaaaaatccaggctcaggctaactattgcaatcaagttcagagtgtatcacttcctggtagccaaagtaaagagggaaatacaatgagttacttctctctaatgaaagagcaagcaactttctccaacgtgaagaaggggttttggctgataaaaggatcagtaaggaaatcttctggctttgtaaattatgttcaccttattggttcaacagattgaaaartaaaggcaaccggccgggcgcggtggctcacgcctgtaatcccagcactttgggaggccgaggcgggtggatcacaaggtcaggagatcgagaccatcctggctaacatggcgaaaccccgtctctactaaaaatacaaaaattagccgggcatggtggcgggcacctttagtcccagctacgcaggaggctgaggcaggagagtagcgtgaacccggaaggcggaccttgcggtgagcagagatcgtgccactgcactccagcctggcaacagagcaagacaccatcaaaaaaaaaaagaaagaaagaaaaagaaaggcaatctaaaataaaactgtatacaaaaaaacaattctatttctcttagtaggaatattttttcccggaatctggaatatccctggggactaaactgaagtagaaatataaaggttatggatttcaaatccatcctggctagcccaaggcactactaatatttatcattaggaaagcatacagatttttctttctagtctgcaggctggagttccagagagaggaatccttgctgaaataatcagtcttgtgttttgtctaatctatgtaagcctcttgggcctcagtcttcacatctataaaatggaattggtattctttgcccaacatctgtttcaaagagcagaactaggtagaaacttgaggaagaaagagagctttggagcaatggagaataaataccattggcttcaaggcttgggactgtctctattcaaaagcaaagttcaggctcgcttcacgatgacgtctatggctcgaaggacacaagagagaaaacaaacaaacaaaaactgtggccgttgaattcagtgagtatttatggagcctaatgcggtaaagactcagccgattgcaaagatcaaaacccaactcgttttaaccaaaagtggaaattattggcccttgtagttgaaaagtccagggttgttttcattcttgcttattgcccccacttctgtgagaacagggaccactctgtgtgattgaccctgaatctctagggcccaggcagtaaacaaccaaacaaatccataaacaagaccatttatgataataaaaaggatatgaagaaaataaaataatcagatgtgagaacaagtgatggggatggaggagggttggggggcagcattcttgagggggccggtccagggaaggcctcttaaggcagtagcacttgaaccaaaggatgacaagcacccattcagatggagatcgggggcagtggggcggggacagcaagtgcaaaggtcctgagtgagaacaagcatgaaggcccctgggatcagagagaaggcatggaggccgaagtgcaggagtaaaagtatggaggtggccaggatagatgagcctggggcaggagatattacagcaatcgaagctcattctaagtgccttggacatctctggggcaagctgatattaagaaggaaaagccacatggtctgggttgtgtgttaaaaagacctctctggctgctgtgtggagaatgggcagtcagaggagaaatgtggtctgggcatggtggctcacacctgtaatcccagcactttgggaggccaaggcgggtggatcacttgagatcaggagttcaagaccagcctggccaacatgatgaaaccctgtctctactaaaaatacaaaaatattagccaggtgtggtggcgggtgcctgtaatcccagctactcaggaagctgaggcaggagaatcacttgaacccaggaggcagaggttgcagtgagctgagatcaagccactgtattccagcctgggcgacagattgaaactccatcttaaaaaaaaaaaaagtaaaaaagaaaagaaatgtggaggcagagagaccagccaagaggctactgcaatagtccaagcaagagaagaaaatggactggatccaggtggtaggaagacgtggacttgagggtgaggtgaagccaagaggacttgctgatagactagatgtggaggttgggggagagagaggtggcaaggactcctgggcttgatctgaccaggatgtgttgtccttcactgagatgggcaaaacagaagaggtgtttggtatgcagtggaggatcccatccccctgtctggggtacgtggggtttgagatgtctgagacaccctggtgaagatgccagatcaggcagcagatagatgagtttgaacctccactgcagtaacaacaccaggcatggaataggcgccttgtggatcttggttgaacctgcgactcaaagccaggtattttgtgggatttctgtgtatttcaagctgatgtcttcagagtcttgccccactctgctgtttctgtctggcccctgaagtcgaagttgcacctctggaaggaggatcttaattaccagctggagctacttagggaagccagtttgtttttattttctaaatttatttcgaaaatgtcccagtgccagaagccccccagggcacctcagcagaattgaaaccacgttatacgatgatgaagttaaaatccacacaagtgaaaacatattgtttgttggtgcaaggcagtccctgtcaaaatctaaagcacagccttctgcagctgcccagggaagctgtgtggaccagagagaggcgtgctcaaggcccggcaaagccagaagcctttgttctccgagcctgtagtagtaccacctgtaagggagttccttcccgcgtccagcagcgctttatgaagggcttaccatttgccaggccctaatggaatgctgtggattcagcagcaaaccaaacacagcaagacccgtgcccacaaggcattgaccttccagttcaggaggctgaccataaacaatggaatgcaaagtataatgtcagagcaaagtgctctgaagagagaccaagagagtcagggaggaggctctcaccagggcttttgttttgtggtttttacttgttatatccaggagaggctcctctgactttttttttttttttttttttgagacagtctcactctgttgtccaggctggaggtacgatcttgtcgcactgcaacctctgcctcctgggttcaagcgattctcctgcctcagcctcccaagtagttgagattacaggcacacgccaccatgtccagctaatttttgtatttttagtagaaacagggcttcaccttgttgggcacggtggtctcgaactcctgacctcaagtgatccaccctcctcaacccccaaaataccaaagtactgggattacaggtgtgagccaccgcacccaggctcttctgacttttgagcaaagacctgaaggaggtggaggaggaggccatgccgatatctgggtgaagagtgttccagatagaagcactgtgcaaaggccaaggtatgattagagttgatgggctccagaaactgggaggaaaccagcaagactgaagcagagggaacaggaagaattgtggtgggcaatgagggtgacgcctttgggccattgtaaggctttgggtaacagccaagggtgacaaaagccactggagggtttggaacaacatgatgtgactttggttcagaagctgcctctggctgcctggtggagaacagactccagaggacaaggattgaagcaggcatccgcattaaatcagcaacttccagactcccaggggaaagaatctgtggggtttaaagaatggtccaggattggcctggtgcggtggctcacgcctgtagtcctaacactttgggaggccgaggcgggtggatcacttgaggtcaggagttcaagaccagcctggccaacatggtgaaaccccgtctttactaaaaatacaaaaattagccaggtgtggtagcaggcgcctgtaatcccagctacccaggaggctggggcaggagaatcactggaacccaggaggcggaagctgcagtgagcagagatcgccccactgtactccrgcctgggcgacagagcaagactcygtctcaaaaaaaaaaaaaaagaataaaaaaaaatggtccgggacacagaaggtgccacatgcagctgtatcttaggatattctgcacgcatgtcccaagttgaggacaaaagccttctaatcagttccatctgctgttgagtcctggatccaccatctcctaacctgggcaagtctctccatccctctgagcctcagtttgctcatctgttaaatgggtggaagaaaagcccccaccatctagggctgtaaggatggagctatgtgaaagcagtcagcacagagcctggcatacctgcccaatgtgggggcctttccaccagggggctacaggggctacatgtgtccctggggataggcaagtgggggttctatggtaccagggcaaattgtttaattgctacatatttattttactgtgaattagaaaactataactagcttgccgacccctgattttacaatcattttataaaagtataggcaacagaaatatgacaaagatgatgacagtcatgagcagaccaggcctgggtcccagccaactgctgcagcttgggcataaatatcgacactccctcccctgctccctgccactttgcctttgtgcaagagctgctgattttgcagctcttactttgcagggcaggtgaaccctcctctgaaatgtcacctgggtcatgggtaagggtggatgttgggttaaaattcaagcacctgctcaagatctgtcaaaactgtcctccagccccactctactgcactcactctgaaagctgttcatgggaagcccccaagccctacttcacagggatgtgccactgtcgagtcagagctggacctaggtctgcggcctctgtcccagccaagcagggaccccttaggttttgacttctgggctcggatgcagccaggaggagatactgttcagccctgccctgtgagaagaagagattggggaggcctggcagccgagactgtgctactgcactccagcctgggcgatagagggagactccatctccaaaaaacaaaaaaaaaaaacaagtattatttatgttttgagatgtcacaactttaatttaaaatacatttaaaacctagatttatgttgaatggctgaaattttataggcagtgtgattaaagatgattccaaatttcagcaaggggacatttagttcgggcatgaaaaagaagttaacaagcaaaggtacctataaacaaaggcatcataaatagatataaagccagaagaaaagggatctaaagtagacagagaagataggctgactctccagttgcagattttcattatcagctcatcacaccaccgaaactctctggtgatttgctatccacatccatggcgtttggtggccctaaagattgtaacggcccccatcctcttggttaaaatggcaggtgtgttgacaagaactgtcttaggtaccccctgcctgctgggcatcacattcttcttggtatatattaaaagaacacaagtttgggccaggcacgatggctcatgcctgtaatcccagcactttgggaggctgagacagtggatcatttgcggtcaggagttcaagaccagcctcgccaacatggcaaaaccccatctctactaaaaatacaaaaaaaaaaaaaaaaaaaaaaattagccaagcagggtggcgtgcacctgtaatctcagttacttgggaggctgaggcagcagaaaccaggaggcggaggttgcagtgagccgagatcacaccactgcagtccagactgggcaacagagcaagacttcatctcaaaataagtaaataaatacatacatacacacatacacacacgcaagatttgcaggcaagatgcagcaggactgaggagggggccttccttgctctcccttgccttagcaggcaatctgtcaatgtcagggtgtcctctggaagccaggaggtgtgcctgagtgaggtgctgtccctgaagaagatgtccaggggctggcatggtgagggcagtagtaagagggaggcaaagagtttggccccaggagggtggaattaatgcatctggccagggagtcaatggtcgcacagcagtggctgaggttggaggcacctggcgtcatcctgcctcacctgagtttctgctgcattctctggtcctggcccctgtccgcttctcttcactccccttgccattacctctgtggtctaagtcaccatcatctttctcttggacgtcatcacggccttctcactgtccccctgctgtctatgaattaggatacaagctcatcaaaataaagaggcttaagtacaacacagatctgtttctctctcatgaggaaatctgaaatgtgaacagtctagggccagaaaggcagctcttccatgccagaagcccaggcacagcggcttccttttcccccaccccccgaaagacagggtcttactctgtcacccaagctggagtgcagtggcatggtcatggctcactgcagcctcgacctcctgggctcaagccatcctcccacctcagcctcctgagtagctgggactataggcaggcgtcaccatgctccgctaatatttttattttctgtagagatggagtctcctatgctacccaggctggtctcaaattcgtagtctcaaggaatcctcctgccttgggctctcaaactgctgggattacaggcatgagccacctattccaggcacattccaggcagcagggaaaaggaggcagagacagagaagggcaccacccagcggttgcagttctctcttctgctcacaccccattggccttaacatagtcacttggccacaccttccaaggcaagggagcctgggaaatgtagtctttattctggacagtcacgtgccaataaaaactgctactaataaagggggaagtgaattgggtattgagggtcagctggcagtctcatcctgacacctttcctcggttttcatcacagtagccagagaggtgaaaaggaaagctgaacatgtcacctgcttaaaactcttcagtaggctgggcacagttgttcgcgcctgtaatcccagcactttggaaggtcgaagcaggtgtatcacttgaggtcaggagttcatgaccagcctggccaacatggcaaaagcctgtctctactaaaaatacaaaaactagcaggtcatcgtggtgggcacctgtaatcccagctactcggtaggctgaggcaggagaatcgcttgaaaccaggaggcagaggttgcagtgaggcaagatcacacctctgcactccagcctgggcaacagagcgagactccatctcaaaaaaaaaaagctcttcagtgagctattatggactgaccccacctgcctctccagactctttttctcctactcttttcatcatttgctccactccagatccaatggtctttttttaattccttgaacatccatgctccccactaccttaagattctgcccacgccatgccctctgtatggaacacgcttccccaccattctcccctcctcttgttctcaaggtccaaggcctcgccagttcctatgcacctcttaaatctctgaaccagttccatgtccttagggaagtcttacccgattcccctcaaaaggttagattctgccatcatatgctcccaggacgcctcatacttatgcggtacattttgtactctttgtaaccatttcataattatttaaagtaattgatgtgaattctgtgttccccaccagctgtgtattccaggagggcagagaacatgtccactgtgttcactgctataactggcacatagtaggtgatcagtaaatcgttgtttcttgacggttgatgatcttgccctacgaccccatccatggtaacaactgccttctggaatttctaactttcaggaaactgactttgtttatgtgcctttgactttattagaaattaagtaggttaacgtcgtccatacaaaacaggatgtatttctcttatctgcagaactctagaggttagcaatccagggacctcttctcgacgaagagctcagattcctgccagcacttaattctcacctcctattttacagacctcaatttccatttactgcattttcttctcctcaaatcctggtttctggttctgcaacctcagccgggtgcctggactctgacccattctcctcatttgctagatcctctagtctggcatgtttgccctggattattcctccacgctgtacacatacctcctaccacctgtattgtgaattaccagccctgctccttagcagtgtcatttgtgtgttgggaggacaggggagtgtacctttttttttttttttctcaaagagtgggcattctgaatgttctcattcacattagtgtcagtgtgtttaactagaccagcattcccacctgagggcagccccatcccttggatggataggggggcgcattagaaactaggggtggggccaggcatggtggctcacgccagtaatcccagcactttgggaggctgaggtggcagatcacttgaggtcagggcttcgagaccagcctggccaacatggtgaaaccccgtctctactaataatacaaaaattagatgggtgtggcagcgggtgcctgtaatcccagctactcaggaggctgaggcacgagaatcactcgaacccaggaggcaatggtcgcggtgagccgagatcgcgccactgcacttcagcctgggtgatggagcaagactcagtctcaaaaaaaaaaaaagaaagaaaagaaaaaaagaaactgggggtgggtgggaggcagagattgcattgagccaaaatcrcaccacttcactccmgcctgggtgacacagttgagactctgtctcaaaagaaaaaaaaaagaaagaaactgggggttggggtagttggttgtcacatgaagggaaagcactgtttgcttttagaggccgggccagcaataccactcaacccaatatgttggacagtcttgtacaaagtggaattgtcccacccaaatgcccaccacactgagtccctgagagatgtcagtcagctgagcagtatttatggatgccttgtgcacagcatgatccaggtttcatgtggtttgctcttaattaaaatacaaaacaaaacaaaacaaaaaaccactttgttaaatgtatggctttttcttactcgtgttttaggggaaaaatgaccagtacatcaaaccagygatgtcataggtaatgatgcccaggatgaagcgtaggtttgtgaaagagcatcagtgtaaagataaatgaggaggccaagcrcagtggctcatgcctgtaatcctagcacttttggaggctgaggygggaggatcasttgagcacaggagtttgagaccagcctgggcaacatgacaaaaccccatatcttcaaaaaatacaaaaaaaaacaaaacaaaattagccgggcatggtgatgagtgcctatagtcccagctacttgggaggctgaggtagaggatcaattgagcctgggaggttgaagctgcagtgagctagctgtgatcacaccattgcacttcagcctgggtgacagagcaagaatatctcagaaaaaaaaaagactgagaagttagtgaaagtggggactcctctatggctaaatccgtgaaggtgcgacatgaaggagcatggctgtatccgggtgagtgccatccactaagaggcctggcaccgtggaaggaatgggatactatttgggatcagaggacctaagttccaattctgaccttgattcttctgagctctaagaccttgaaggaggtatttaacttggctgactttccacttcttcgtctgaaccagatctcaataataactgacatttactgagcactcactacataccaggcactgttctagctggcttgtatgtttcactttatttaatcctattatgatccccattatactagtctgctcagtctgtcctaataaaataccatggagcgggtggcttacacgacagaaattttctttctcccagttctgcaggctggaagtccatgatccaggtgctggcaaagttggtttctggtgagggccctcttcttggcttgcagatggctgcatttttgctgtgtcttcacccggcctttcctcaatgcatgtacatggagagagagccagagagagaaaacagctgtctggtgtctcctctaacaaggacaccaatcccattgggttagggccccaccctgtgacctcacttaaacttaattacttccttagaggccctacctctaaatacagccacatagggaggttagattttcaacatatgaattttgggaggagacacaaacgttcagttcataacatccattttacaaatgaggaaactgaggcagagagtggctaagtgaacagcccaagtcacatagttggcagtggcaatattcagacccaggtggcctggctccagagaccctgcccttacccatggtgctgtgttgcccctgccagggacagtgatgtccgtctggtttgagaaaaaggattcccagtaagaatttaggagctcgtgcagtgccgcagacagtggactcaaaggaagaaaagaaagtgcaagggaggctggagtcactgagaagtgtggtggcggaaagccaagatctgacaccaggaggaggaggaagtcccaatgttcatggagaaaacaaatatttttcatctctttgggtttttctgattttgtttttgtttattttgttttgtgtgtgtgtgtgtgtgtgtgtgtgtgtgtgtgtgtgtgttttgagatggagcctcgctctgtctctcaggctggagtgcagtgctgcgatctcagctcactgcaaccttcacctccctggttcaagcaattctcatgcctcagcctcccgagtagttgggaccaccagctgatagctcctaaagccaccacacctggctaattcttgtatttttagtagagacagggtttcaccatgttggtcaggctggtctcaaactcccgacctcaagtgatccacccacttcagcctcccaaagtgctgggattacaggcgtgagccgccgcacctggccaagatttttcatgtctttgtaagatgaaaaatcgaattattagattcctctgctgtgagtttgcatagcaccttatgcaaagtaaaactcacacaaatagcaacaagcaaccacatgaacacgacagcatccttcactccccgctgaggggatgaatcgcctggaggtgatcaaagcaatgtgcaagggatctgaatgcaccttctagaaaagacatgttactcccacatgctgagtgcacatgtgggagtaacaagcacaatcccgatgggagctagtgtgtcctgcatgcgactgtgtgcctggcagtgactgaagggcttgtctgtacccattcattaacccttacaacaaccacagagggcaggtactgttatgtatccccatgttagagatggggaaactgaggcacagagckgttcacttgtgcgacagctgacgcatatcaagctcttcttttgcaccaggcattgcgcatgaaccatctcaccgcatcctcacagcagccctgcaaaggagatggttttttcaatctccattttacagatgaggaaactgaggcccagaaagatccctttcccagggtcacacagctagtaagaagaatgtggagatttgatcccaggccaaatgacttctctgctaatgtctatctttcatggagaatagagtttgagatgaactaggaagtggagaacatgcatcaactgaatggatggaagaaaagagtctttcagggggccagccatggtggctcatgcctgtaatcccagcactttgggagaccaaggtgggcaggtcacttgaggtcaggagttcaagaccagcccagccaatgtggcgaaatcccgtctctacttaaatatatatatatatacatacacacacacacacacatatatatacatacacacacacacacatatatatacatacacacacacacacacacacacacacacacacacacacatatatatatatatatatatatatatatatatatatatatatatatatatatatatattagccgggcatggtggtgcatgcctgtagtcccagctactcgggaggctaaggcaggagaattgcctgagcccgggagacagaggttgcagtgagccaagatagcaccactgcactccagcctgggcaacagagcaagactccatctcaaaaaataaaaaaataaggaaagagcctttcaggagaaacaaggtaacgctaaagatctttggcaaaaggtatccctagcctgacgcaggaatggccaggcattcgggcaggctggaaggggagcatttcaagatgcagccagggctttaggaaagaccatgccggagagactcagaagttgctgaaatcagggcagccatggctgcttgcctgacacatgagcctggttgctaaacgtgtgatttatcctgatagctttaggagccatcaggaaaataatatgtcactgtgttaacactgaactctctccaaagcatcctgcccaatggtcattaatacaattcaggccacagcctctttagcgctcttaagataagttaaacacttagcacaagagatgtggcccaggtttccctcccagggagtagactcctctctggctagtctggaggcagcattaagcaatctcacttgaaaaatatacctgcctcagaggagaaggagcagccaggaagttcatcggggccctgatgagcatcatttttctaacgcaaatttgtcaacaatttctgcattcatgtctccaagcagccaaagacaaaaagtaatggaatcaaaccacagcaggagagtttgagaaaccccagctgtcaccagctcaatcagaacaggttttgataagtatttgtcactgagtttactgatcagcaacgtgcaacaacagtaatactaagtatcggctggggatggtggctcatgcctgtaattccagcattttgggaagctgaggagggcagatcacttgaggtcaggagttcgagaccagactggccaagatggtgaaacctcatctctactaaaaatacaaaaattagccaggcatagtggtrcacgctgtagtcccagctactcaggaggctgaggcagaacaatcacttgaacccaggaggcggaggttgcagtgagccgagattgcacaactgcactccagccttggtgacagagcaagactccgtctcaaaaaaaaaaaaaaaaaaaaaaaaagagtactaagtatcatacctgtgggatgcagaagggcagtccagattggcatttacagtcctaaatgacatttgttagaaaaacaggaaaattcataagaataattggaaagaccgttaaaatagataaggctttagcaagcttaatcaaaggggaaaagagagagatcaataaacaacatccagaatgaaagggtggacattactaaaatccaggggaggttgtttcttttaattacaagaatgccaggcacactgttttaccaatgaatttgaaaatctaggtgagattgacacttttcaggaagacacaaattactgaaattagcccaagtggaaataaaaataaatacaacaaaccaaagatcatgaaaatttgttaaatcattaaagagaaagtgcgtttttggtgcccccaccaaaaaaggcaccaggtcccactggttttaaacaagagttccaacaaaacttcaaggaaaggataaatctcatccagcataaactacagagcaaagaaaaagatggaatgctctcccacacattttataagactaacatcaccctaaagctgacactggagttacagcgcatatgacaaatggacaaattgcggtcgtcgctgctgaagttggaaggcccctgcgatcccagcacctaccttcatccatgccctgtgactctttacagaagttttctgcagatcctgtctgagctttagtttccacactggtgaaaagaggggtctggactataattggtatcatttatttgacacctgccccttgcctcgtaacacacctgcaagcagatagaataaccatattttgtaattttttwaaaaacactgaagactgtctgggtgcagtggctcacgcctgtaatttcagcactttggaaggcccaggtgggtgggattacctgaggtcaggagtttgagaccagcctggtcaacatgatgaaaccccatctctactaaaaatacaaaaaattagccagatgtggtggcaggcatttgtaatgccggctacttgggagactgaggcaggagaatcgcttgaacccaggagatggaggttgcagtgagccgagatcaccccactgcactccagcctgggtgacaagagtgaaactctgtctcaamaaaaaaaaaaggaaactgaagaccttgctgtgttacctgagcccaggaacgatgacacccttgtagcaatgaggatactcagataacagtttctaataccaygctgcaagaaaaaggaaccagagctccatggagaaatggctgattctagggctgggccaagaactatatgattatcccagagcatcttttagcaccgtaaagtaaggaattgctcaggaaaacccaaagtgatacgttatgccagaggaacacaggatccaactgaaaagagttcccaatggccaaatccagaaagataaaaagaacaacaaaataaaacaaaagctggagtaataaaataaataatataatatcagatcccaatggccaaatctggaacaataaataaaaaggagagcaaaataaaataaaagctggaataataaaataaataatgtaatatcagattctaacccaaagtataaaataagtatgtatgagtctatgctgatgtagataaatgattgcataaataaataagtggggagactaaacaaatctcccacacagaaaaattccaggtaacttatgtagatactacacccatagtgtgagccacgcatagtgacttctttccaaagagtacaatatagatgaggggaatagtaacttcggagtggagaaccctgatgaagaccacctgagccaggtgatcaaggtcaacatcaacagtgattagtcatgttgataatatttacccttgatgtgatatgaagagaatggcactccccatctgtgaccttcccaaaacccaggaacccggtgtcatcatgagaaaaacatcggaaaaatcccagttgacaaacattttacaaaatacctgaccagttctccttcacaccgtcctcaaaagcaaggaaagcctgagaaactgtcacaaaccagagaagcctaaggagacaggacaactacgtgtcatgtgatatccaccttggatcctgraacagtccaagaacagtacagggaaagccttaaaaatctgaataagtaattgacagtagttaacacagcactatctgcttattagttttgacaaatgcagcatactaatgtaagaagttaacaaaaggagaaagtgggtgtggggtgtatgggaactctctgtactatctttgcaacttttctgtaaatctaaaactattccaggccagccacggtggctcatgcctggaatcccagcactttgggaggccaaggtgggcgkatcacttgtggtcaggagttcgagaccagtctggccaacatggtgaaaccctgtctctactaaaaatacaaaaattagccaggcatggtggcgcatgcctgtaatcccagctacttgggaggctgaggcaggagaatcactgacctgagaggcggaggctgcagtgagctgcaggaagccactgtgtgggcagtgtagtgaggagagggtaggagatgaggtcagggaggtgatgaacctgagggtgggcagaccacatggagccaggttccactgtgaggactgtgcttttatttggagggaggtgatatccattgtggggatttgagcaggagcgggacgtgatctgacttagggttgaacaggatccctctggctgctggctggagactaggctgggaggataggggctagataaggataggagcaggaagagtgaggaggtgactgtagtagcctacaccaggggtcaacaaacttctgtaaaggaccagatagtaaatatttttggctttgcacatcatagtggacctgtctcagctactcagttctcctgcagtagcacaaaagctgyagcagacaggatgtaattgcatgaacatagatgtgttctaataaaactttatttacacaaacaggcgacaggccagatttggcccctgggttatagcttactaacctctgatctaggtgggagatgatggtggtttggaccacggtggggcggggggcggtgcgggcagtggaggaggtgagaatggtcagattgtgggtatatgtcgaagggaaagccaacaggatttggtgatggatgggtggcaggatgtcagagagaggagacggggataactccaagacacatgcagtgcctaggccagtgttgggaacatagaaggtgatcagtgtgtacgcatcttgaatcagcaatttggtatttcatgcctctttgccttgtcttttccagtgacatgataggcactgtgagggcaagagccagatttcatccttgaagcctcccctctctttttttttttcaagcttaattcactttatttttcttgtataaaaaccctaygttgtagccacagctggagcctgagtcctctgcacagagactctgatggggtcttgacaaggtagtcagtgaattcctgacctgaattcctgaattctagggagacttggtgaatacagtctccttccagaggttgggggtcgggtagctgtaggtcttagagatagcatcaaaggtggccttggygaagtttcccagggtggcagtgcagctgcggcgtagcagtcatagatacccgccatcagcagcagcttttgggcatggggacygagaygatgccagtgcccctgggtgcagggatgaagtgcaccagcacagagccacagtggcctgtcaccttacaagggacggtgtggggcttgccgatcttgctcccccagtagcctctgcacatggggacaatggagagctagcccaggatgatggccccgcggatggcgtggccacctccttggagcacttaacacccagaycgacataccattatagtcaccgatgacaataaatcccttgagcctggtgcgctggctggcgtgggtctgcttttgtactggcatgatcttcaaaacctcatccttgagagaagcccccaggaaaaagtcaatgatctcaaactctttgatggccaggaagaagagatagatctcctccaggaacttgatcttcatgtccttgaccaggtggcccagcttggggatagacgtccactccttgtccttggtcttgcctctgtgagctcctcggccttggcccgggccctgtccgcggctatgaccccagccccsgatgcccctgctgaagcctccacrgaagccaccgtggttccccatcccagggtccccagggcctccagccccccatcccccaaaaccggatgttttcttggagaagaaagaagcttcccctctcttgacccatcawtgtctgatgcggtgccgggcccatagtaggtgtttttatagtcttgggatagacagatcttctcgagcacaggctctgaaaggagatgggtccgggtgctggctcctcttcccctcgccttgggcacatctgagtttgcttgrgctgccattacaaagtcccacagactgggtgccttaaacaagagaaacttactgtcccacagttcatgagacgagaagtccaagatcaaggttggttccttctgagggctgcaagggagaatcttttccttgcctttctcctagctcctggtggtctcggatgtcctctgactcgtagagaacatgtcacccggtctctgtcctcgtcatcacctggcattcttcgtcttctgtctctgtgtccaaataccccctttataaggacacagacatattggatgaaggcccacgctaaggtcctcatcttaatgtgatcatctgcaaagaccctatttccaaataaggtcacattcaacatcttgtaggggacacagttcaacccataacaggcatgttcctacactcctctctgcctcattttctcctagtttcccactacatatatagaaagtgctggccatagtccctggcacattgaaagcttttaataaatactagtttctatccctagtccaatactagtttctgtccagtgatagagatttttgtctctatctcactgagatatttgtaattaatttttttcaaaagcagtacatacacacattatccttttttttttttttttttgagacacagtctcgccctgtcacccaggctgaagtacagtggtgcgatcataactcactccagcctcgacctccccaggcttaggtgatcctcccacctcagcctcccaagtagctacaactgtaggtacatgtcgctacacctggctaatttttgtatttttggtagaaacagagtctcaccatgttgtccaggctggtctcaaactcttgggctcaggagatgcaccctctttggcctcccaaagtgttaggattataggtgtgagccaccacacctggccctcattttttttaatgaaagtatttcaataagctaaaaccttctttgatcaccagcccaatcccagtgactccccatatgaaactgctgcttccagccagatgtatgggcttccagatctttctttttccagttatgtacaatatatccatataaaaatctcatattttaatgggattttataaatatatacatggcatcatactgggtgtatcactcttttttttttttaaacagagtcttgctctgtcacccaggctggagtgcagtggcgccatctcagctcactgtaacctccacctcctgggctcaagcgatcctcctttctcagcctcccaagtagctgggattacaggtgtatgccaccatgcctggctaactttttgtatttttaatagagacagggtttcactatgttggccaggctggtctccaactcctgacctcaagctatctgcccaccttggcctcccaaagtgctgggattacagatgtaagccaccgcgcccagccggatgtatgattctttaacctgcgtttttcacactccaggatgtcttggaaccatttccatgtgctagcataaaaattcacctccttggcttgggacgtggctcacgcctgtaatccccgcactttgggagtccgaggcaggggggtcatctgaggtcgggagttcaagaccggcctgaccaagatggagaaaccccgtctctactaaaaatacaaaattagccaggcgtggtggtgcatgcctgtaatcccagctactcagaaggctgaggcaggagaattgcttgaacctgggaggaagaggttgcagtgagccgagactgcaccattacactccagcctgggcaacaagagcaaaacactgtctcaaaaaaaaaaaaaaaaaaaaaatccacctcctttttctgcactgctgggtaggattccactgaatggatataccacattttatttagctacgacctcatcaagggaactttaggtgttttccagtttctcaccaggatgatggacatttttacacaaggctctttgcaggtgttactctgggtcagaaagtaaaaatccctcgagacggggattgcaccaggtcccggtcctcagccccactgcacttcacctgtgtcaaggccacgggaacccttccaccgtctctgccagcagatgccattcagcacccaccccaagatactcatactttgacccggaagagaccagaagcaccctgcagttcgtgtggacaagtctcccctctgacttacagtcccctcaccctcgtacctaggagagggatggcagcgctgagggtcgtgggattctcttccctggaggctcccccatcctcgtggcctctgcgcggtccagctcccctccgagctggctcaaggggtaacttgatccaggtcagctggtggagtatgaggtagcgtctagctgagcgtcacggtattttattaagtccgaaatgtgatcgctactgttgtcacactttagcgcccccaacaatccccttacaaatgagaaaaacagagcctccccaaatgcctttcctctgacatcaaggaaagcgcatggaaccctgcccagaggcctgagcccgggtgaccccaggagtggctccagagcttgaggaaaggcctggggggcggagggggtgtttttccagtttcaggcaaagcagtgagctgggggctatctgctgtttcctctgcgcctgggtctgtaaagtcagcggttgccgtttaaatcccattttccttaacatgtcaggattgctcattctaggccatccatttatatggccatggctcagaggtctcagactcacatgcctaggggggtcaaggatccaggtaacgtaaactgaagcaagccccgtagagatggtgggaaactgtaaatggatgccctggctgaaggaggtagctgaaaatctggagagagaacaagaacaagaagagaaagggaagaggaggcagagagaaaagagagaggacatcccccaagtttacatattgcccattgcttcaaaaaaatttaaacatgcaatgagctaagtagrtatgtctccaggccagtttgcaggctcttccctaactgaacttatcaacacagtagacaagctgccggcctggctccctcacccctctagagcagcrctgtccagtagagatttctgcratgataaaatatctgcagcgttcactgcaataaccactggctacatgtagctcttgagcacttgaagtaggactaaagaactgaacctttaatgttatttaactttactgaatttcaatataactataactagccacaggcaactaattgctaccatattagacaacatggctctagattctttcaatgtggagggtatcatcgtgcttgactactgcaaaaaagatcactccttcttggggagagggggtagattatacctgagaccaccaagcattaatcagagtcctgggtaaatggaaagaaaggaaattcgaaatactgagcagtaaaagcttaggtgtaaccagatgtctgctggctcaagagtggtcactcagtgtccttccactcccccacttcccagtgagtttctcattcagggtcaccctttagcatccactgtgttcttggccatctgcttactcccatttgcccagagctgacccctaggaagccacctgggggtacttccctgctgccgttggtctccaggccttaagagcacaccactgtccaaacccagggtgctgcccgtgggtcacagaggtgcaaggtcctatgcagaggcgagaacggcagttgcactttgtcacctgccacaaagttgctgtgcctgggcccatgtgtgtcaaggactctggaaacaagcctcacctttcatcaaaaccctttctaatctgaggccctttcaaggggccggagagggaccagcagccacactacccccttgccaacccctctctcagattccagcccagctccccacagggcaacccaggctgccccagatgccactgacccctctcttgcctccctaaacatcaccataacaacaagactaccttatgtatcttttaaaaattaatgaggaggcctgtaattctaccactttgggaggccacagcgggaggatcacttgagcccagaagttcaagaccagcctgggcaacatattgagaccctatctctatttttcaaaaaaagaaaaaaaatgaatgaggtaggggcttcccaccatccccctgcaaagcttatattctcaaagataaattcaagccttttggccaggcacggtggctcatgcctgcaatcttagcacttcgggaggccaagactagaggatctcttgaggccaggagtttgagaccagcctggccaacatagcaaaacctcatctctactcaaaatacaaaaattagctaggcatggtggcacacacctgtagtcccaactacttgagaggctgaggcttgagaatcacctaaacctgggaggtggtggcagtgaactgagattgtgccactgcactccagcttgggtgacagagcaagactgtcttaaaaaaaaaaaaaaaaaaaaaaaaaaaaaaaaaaaaaaaaaagctttttgcttgtccaattgtctaaaaagagatctgttcaaaatgttgcaaataccctttcttccaatttctctactcccatcaaggttccagagatgttacaaccaattttttctcagtagtcaagctcagagtcccacgtgcttctcctcctccagcagcctttgtaaggaggcagctgcctcgagaaatcaccttgcaactaaactgtgggaaaatgtgtaagatcttaacacagtggtagaaactaacatgtatgcagtagccactgtgcacccgacactgttctcggtgctctcatgcagcatctcgcttctcctcacctcatctggaggtgggttcagttatcaggtccatttatcagtcaggcctctggggttcaygagggtcatgcccctcactcaaggtcacacactgggaagcggttggatccaggatccaggcccaggcagtcagattccagagcctgcaccctgaaccagtaccgcaggggctggcacccccgcacattttttgccccatcaacatattatcatgtcactccgccagcatcatgaagtgcactcatgatatgtttgccccatcagcgtgtcacgagggcatttcatgatgcaggcggggttggcaggtgtgcatcgtgtaggctccacatgggacatggcatcccttatgactcttggctgcaaagtgccagaaacccagctccactcacttaatctgaaaagtgggtgtatttgttcgccagggctgctgtaacaaatttcccccagttactggcttcaaacaacacacacgtgtcctcttacagttctggaggtcaggctctgagaggagaatcggtttttttactttttttttttttttttttgagacagagtctcgctctgtcgcccaggctggagtgcagtggtgtgatctcagctcactgcagcctcctgcctcccaggttcaagctattctcgtgcctcagcctcccaagtagctgggaccacagatgtgcaccaccatgcccagctaattttttgtatttttagtagaggtggggtttctccatgttggccaggctggtctcraactcctggcctcaagtgatccacccgcctcagcctcccaaaatgctgagattacaggtgtaagccaccacacctggccctttggttttttgtttgttttagtttttcttycagtggccacttgtgtatgttgactgtggtctcttcttccatcttcaaagcacatgactccagtcaccctctcctttctgtcatcagatcactgtctctcttacagggacccatgtgattccatttagggcccaccccgacagccaaggaaaaacttcccacctcaagatctctaactgaactaaagtcctgattgccatttaaagtaatagatttgcaggttccgagataagaatgtgcgcatctttgggggttcgttattcggcccagcacagtcagggatggctcagcttcagtcctgactggatccaggggatcagatcgcatgctcatggcatccccctctccagctcgcagccctgctttcctcagcagctcccggcttaatccaccattcarcagccccagggaagagacagcacctcttccaaaagtgccagccaacgtccccgggctggttcccattggcccaccttagaccacatgttcatccttgaagcaatcactgtggccagggggaccttgggtccctctgattggttttcattgtccccaccccgtagtcttttgtttttttgtttttttgtttttttttgagacagagtcttgctctgtcatgcaggctggagcacagtggcgcgatctcggctcactacaacctccacttgctgggttcaagcagttctcctgcytcagcctcccgagtagctgggattacaggcagctgccaccacgcccagctaatttgtgtattttagtagagacagggtttcatcatgttggccaggctggtctcaaactcctgacctcaaacaatccacccgcctgtctcccacagtgctaggattacaggcatgagccaccatgcccagcctccaccccatggtcttgtcccacagagagaggtgtttccccaaggaaactgagtgggaaacagcatggcattggagtttgttcaatggcaagccctggggatagtgcctggcacatagtaagygctcagtaaatgatgatcacagatcatgaggcacagcaggtgtccctccaggagccaatacttgaagagcacagggtttactaagcagatgtaggcaggagagcatttcaagcagggggaacacctttagcgaggcagaggtgtccaccatatggccagggtgaccaaatgtctggccatacttgggaagctggggacctaggggagtcctggtttgaacctatccccctagtataataccatccccctttaatgcaaaactctctctgtttggagagtatctgtatggtcactttccttgcagtcaacctgctcatttataaggaaaccaaacagacaaagaggatgagattgaacccaaggacctctaaccttgagtatccaaatccagactagaacccgagcctgatgactcccagtgcagtgctcatcccagccctcagcttatgaggccaacccttgaaggctacatcagattaaccaggcatgttctctctctctctctctctctgtcaaattttccataggattgtgaccagatccacgttgatgacgtctcatcagatgacaatggccaagatttaaggtgggaatttggggagtcaaaaatgcccattgattgaytgattgattatcaagttatccttctactaggaagtggggtgggagaggagggctgcttataaggacaaggwgtgcctgcctccagccagaactgggacttttgcatctcagactcaaaaatcacaactagscgggtgtggtggctcatacttgtaatcccagcactttgggaggtcttagcaggaggatcacttgagctcaggagttcaaaaccagcctgagcaacatagtgagacccccatctctactataataaataaatgagtaaaaatttgtttaaaaaatcacaacctcacccctcaaccctacagtctcttgctcatcacctcaaatcactaaactctgctcatttattgctatttttttcctgcttactgaagtaatgcatgcataacagaaaaaattcaaacacttaacctgacctcacctcccaaactcaccaccattaagagtttagtatatattcttcaaagatctgctcaaaatgttgaaaataccctttctttcagcttctctcctccaatcaagggtccggagatgttataaccaattttttctcagtagtcaagctcagagtttcacgtgcttctcctcctccagcagtcttcgtaaggaggcagctgcctccaaatatttggttgtattcattagcatacatatatatwtttttttctttttcttttttttgaggctgactttcactcttgtcacccaggctggagtgcaatggtgtgatctcagctcactgcaacctccacctcccaggctcaagcaattctcctgcctcagcctcctgagtagctgggattacagtcatgcaccaccacacccagctaatttttttgtttttttagtagaggcggggtttcaccatattggccaggctggtctcaaactcctaacctcaagtgatctacccacctcagcctcccagagtgctggggttacaggcgtgagccaccgcacccgaccagcatgcatatatttttaatataacaattgatacagccaatacttaagaaacacttctcaaatgaataagtggtgtgtctggtttctaggggaaaacactcccaggacatggcttccaggaatcaggtaacccattgcttaatatgagacaccttcaggccgggtgtggtggctcacgcctgtaatcccagcactttgggaggccaaggcgcaaggatcacctgaggtcaggagttcgagaccagcctggccaacacagtgaaaccccatctctactaaaaatacaaaaattagccgggcgtggtggcgggcgcctgtaatcccagctacttgggaggctgaggcaggagaattgcttgaacccaggaggcggaggttgcagcgagccgagatcgtgccactgcactccagcctggggtacagagcgagactccgtctcaaaaaaaaaaaaaaaagagagacagcttccagaggaatgtgggctggaatgttccaagcctgcccctgggaaaactttgtaaaaatggaaccatagttaatctgtgctcatccaaaattaccacaattcaayggctttaggctcatcagatatattattagaccaactaatgttttggttacgggatcagtcattgtaactttatttagtagctgcttccaaggtgtctctcccaacttactgcaaaaacaaaaatcaaaatttctgttcctgagccctgcaagtcttttcaaagcccggcacaatcggaagtgatcagccggcagatgcctgcttcattttaatcagccattcggaaaatcccttctgcaatcaggactggcaaggagcaaagctccagccccaccaggacttctcacctgatggartaaataaaccccagatcaaggttaattggtcctttccatgaagtcatcgttgggaagcactcttcctttcaaggcagtgagcagcaccgttctgtttctatagtttcccctgtagctagctggcttggaattgagagcaacagtcctctgaaccctgtctcatgctgagctgtttggtacctcactttgagaattctcagcccaagggtgttttcttccttagagaccaaattctccacttattcattcaagaaatatttatggagtacctactatatgctaggtcccaaacatgaaatgcctcttgtttgtttttttgttttgttttgttttgttttgtttttttcagttagcagtaagaaccaaccttcagagatgcctcgttttgtgccatgttctattctaaatgcattacatgggataactcattgcatatccacagtaaccctaggagagagagatgcttttatcctcatcctcatttttcagctggggaatgtgaggcatagagagattgagcaattggcccaaactcacatggctggtcagcagggaaggcaggattcaaatccaggcagcctggctctgggacccaagctcttaacagatcctctgtccatcctggacactggttcctgccctccccaagggcctccatctcctaacatctagacatctccccatggtagcatctgagttaatggtgagcgttcactttttcaagaataaatctatggccgggcacagtggctcacgcctgtaatcccagcactttgggagcccaaggcgggtggatcacttgaggtcmggagtgcaagaccagcctggccaacatggtgaaaccctgtctctactaaaaatacaaaaaattacctgggtgtggtggagggcacctgtaatcccagctacttgggagggggaggctgaggcaggagaatcacttgaacctgggaggcagaggttgcagtgagccgagatcatgcctttgcactccagcmtgggcaacagagyaagactccatctcaaaataaataaaaawaaataaaaaaaataaaaaaataaaaagtcaaaataagggacgaggcacggtggtgcatgcctataatcccagcactttgggaagccaaggtaggaggatcccttgagcccaggagttcaagaacagcccaggcaacatagagagactccatctctccaaaaaataaaaataagttagccaagtgtggtggcgcacacacgaggagcctgtgggcccagctcctcggaaggctgaggtaaaaggatcccttgagctgggaggttgaggctgccatgagctgtgatgacaccactgcactccaacctgggcaacagcgcaagaccctgtctcaaaaaaataaaaattaaaaaataaaygaaaggcaaatggatgtggatcaggtaagagcaaaagacaccacttttcttggggaagctaatgaaagctgtggtcctgctgccccccaaatgcacactcgcagcaccctgtgcatttcgaggggctcatggacacccaaaagcccacccgtgggtcccacagagcctgtggtctcccagggaagatgccctgcaccccccwgcactaacactgtccctcccstcctctctccgcagcacatacaacttctccgctgacggcttccacagttcggccccaggagccaacctgtgcctgggctctggcgtgcacggcggcgtggactggatgaggaagctggccttccgctaccggcgggtgaaggagatgtacaatacctacaagaacaacgttggtggtgagtactgtgagccttgggcctccgaggaagggaarctcattgggatggatgctgtcagtgtccctgctgtgccaggcgccaggcagagaggttcacaagttcagtaccagcccacttaatgcaaccctgacgacacccttcggaatagagcactgggattttgtcaccttcactttgggggtgggaaagctrangganggaggctgcatctggtccaagatccttcaggccwcaaatggcgcggggtggacgtgggggcggaattctcttacccacagccagaggctctcacagtgtggtcctccaagtagcagcgacagcatcacctggggatgtgttgaaaatgcagattctctggccctacctcaggcctagcaaatctgaaactctgcgctgggrcccagaatctgtgttttcacagccctggaatccccccttggattctggaattccagaatccccctggaatcgggaggacctgtgccttgagtctttgcatctcagattgttgtccgcagaccaaccacatcagcatcccccggagctggttagaagtgcagggtcaccagcaggcagagtctgcagtgacccaagattacaccactgcaccccagcctgggcaacaaagtgagaccccgtaaaaaaaaaaaaaaaaaaaaaaacgtgcagggtctcaggcctcatcctgggcaactgactcagaatctgctttaaaaaatttttttttatttttgagacaaggtcttgctatgctrcccaggctggtctcaaactacttctggcctcaagtgatcttcccacctcagcctcccaagtagctgggattagaggcatgcaccacctgcctggcccagaatctgcatttttgacaagcccgccaggtgactgtggaggcattaaagttgaagaagccctagaagtcactggttctcacacgtggctctcattggaaccacccagggagtttcagttgctggtggtcttggtatcactgcagcctggacatcaggagtcataaagatccctggggaattctaagtgcagccaaggagagacccgccccctggcttcaggtactaggaacatttgctcattgccccaaacaagaagtctgaaggcactgaaggcgaggctggctcagccgtagtctagagaattctggagttctctagaacagaggtttttaactaggggtggtactgcgccctccycaggagacatctgggagtcttcctggttgccacagtgcctggaaccaaccactggcccataagggcagggtttsagtaggtggctaatagtgtctgcaatatacacattggccccaaaaacttctagggccccctccctccattcctagaaagaatagagtcccggttctcaaactggacagaacacacttccagtcgcagctctacaactttctagctatgtggccttaggcaacatacatacggtcatsttaatgagccttagtctttaaatctatgaaatggagaatacaaatacttctgcttccctggattattgagagatttattgttagtgcatacaaaaggcatgactccatgcctgatacacagcgggaactcaataaatggtggcatttgtcacgagttgctctcagttttgcttgggagcctcgggttcccctgcgtcttctactgtccctggagctttcccatccgttctttgggacagacttcccgtcgtgttcrtggctgcggtgctaatgcagcccacgtgctaagcgcggtcctggcagtagctaatgtttaaggagcactcgctctgccagttttgccaccrttttcatggactagctccttcactcttcacagcatgcctgtaaggtaaatgtttttatcaacggtgttgcttgaaagcagaaactgagatgacggaggttaagtaacctgcccagcgtcacacagcccaggcagaagggccacagtggagtcccaggctgggtgactgcaccacctctgcccttcagggccacayttgrtggcctctcagatgtgagtgtgttgattgcaggagtgaagcagcaagctctggtcaggtcccagcctttgtacccagccctgcacggagggaggaggggagcaggagggctgactcaggtgagacagggatggggttggccrccagagagcatctgttccccatccaggttaaggcccaggaaatgccagggctttgtcaggctgctctgctcacccatagctgaggggagagcacccaaggcgtcagccagtgaggagcccacagccagcggcatgccggtctccttccccaacccagctgttcctgcatcacagaactagccaggtgcatggccgtgscttccagcccagggatcaccacagatccccacgattccaagtgttttagaaggtacactcggaagaaagscatctgcaaaatacagaatagagaaaatgcttagtaaatcaccatctaggaggcaggggttgaaatcaggggccttagcctgatgtcatccttccatctaccacttcccatgtagctctgagcaggttatttgacctccctgtgcctcagtttcctcctcgtgtgcaaaatggggccagtgatgctgcccagcatcattggtagatggctaatagtgtctgcaatatacacaatatacacaaggattcatgccaggatgttgtgaattcacacaggaaaggtgctcagaacggcatctgacacacataagctctcattaagtggcacttttgttatctsgggaaggtgggaaggaggccaagcctggaggaaaacgccgaggaaacagcttgaagcacacttcccagcgtggagcaaagtaggggtggttgggcagccagctacacaagacagcacgttgggaagccctttgtcarctgaaaagtgctgagccttgtgagtttgtattgttactgagggttccagctaagsgtctgtggggaaggtgcagagacagaggaaaaccagaggccgtgtgttctcctagagttgatagactaatgagaagatgggacatgtagcagtaagaagattcattcattcattcattcttccacgtgtccatcgtcaaaggcctaggttgtggattcagcagtgaacaaaagaaacaaggtccctgttttcaaagagtttatattcagtgagtggaggaaacagaccatcaacaagtgagcaaatcacttaaattctttttttttttttttttttttgagatggagkcttgctctgtcacccaggctggaatacagtggcatgatctcggctcactgcaacctctacctcccaggttcaagtgactctcctgcctcagcctcccgagtagctgggattacaggcacatgccaccatgcccggctaatttttgtatttttaatagagatgaggtttcaccatgttggccaggctggtcttgaactcctgagctcaggtgatccacccgtctcagcctcccaaagtactgggattacaggtatgagccaccatgcccggctttaaattcttaattcagtcatttcgaggatgatcacacctattgaagaaacagatatggcagaragcccagcgtgggcagtggtggccaggggatacttggaatagtagacccagagtccatctctcaggaagggctatttgaactcagtattctaaatattctagatgagattctaataatgataaccagatgcccagagctggggaatgaccaatacaagcaaagagtcaatcagttcagctacattcaactgcataagtaaaagaacaaccaaccaaaaaataacacaaaaaacaacaatggcttaaaccagatagaaatgtattttttttcttatatacaaaagctgtaggcattccaagctggccaagtactctacagtgttatgagcccaggatcccaggatccttctttctttttttttttttgagacagagtctcactctgccacctaggctggagtatagtggcacaatctcggctcactgcaacctccgcctccygagttcaagcaattctcctgcctcagcctcccaagtagctgggaatacaggcgcctgccaccacacccggctaatttttgtatttttagtagagatagagacgggatttcaccacgttggccaggctgatctcgaactcctgacctcagatgatctgcccgcctcggcctccaaaagtgctgggattacaggcatgagccaccctgcctggccccttctatctttgtatttatttatttatttattgagactgggtctcactctgtttctcaggctggagtgcagtggcatgatctcggctcactgcaccctcgacctcctaggctcaagtgatcctcccacctcagccttcagaatagctgggaccacaggcacatgccaccatgcctggctaatttttaaattttttgtaaagatggggccttcctgtcttgcccaggctggtctcaaacccctggctcaagcgatcctcccacctcagcctcccaaagtgctggggttacaggcgtgggccacctcacccagccaaaatcaggattcttattactaatgagaagatccttttgtatttatatttttactaattacaagtgaaaaaaatggatagtggatggcaactaagtgtctaccacaaacagcaaatgaaaagtctctgagacaaaaagagtttgacacttttcagaaagataaagaaggccagcatagctgaatagctggagtgagggggcacgtggtccaggacaggatgagagagctggcggtgtccagatgacataaggcccagtttggacactgggctcttctatgtagagaagacgatgtctccatagcacaggcagcattttgtcctaattaattcattcttccttcaacaaatactgattgagcatcaagcacaggccagcccctgctacagaaactgctgctatgatggcgaacaagactgacttggtccctgccctctgccctagagtgaatagcctaatggccaaggcagatgccaaacacatcgtcacacagatacacttaaaattagagttgtgagaagtgctgtgaagaagagctacagtgtgttgggagaatataaactaaagggaccwgacccagcctggagagatcaggttagaccttccagaacaaatgacatttaagatgaggccgtaaggcaggatgcagaggttcacacctgtaattccagcactttgggaggccaaggcaggattgcttgaggccaggagttcaagaccagtttgggcaacatagcaagaccccacctctatgaaaaatacaaaatttagccggacatggtggcaggcatctgtagttccagctactcaggaggctaaggtggaaggattgcaggattgcttgaacctgggagactgaggctgcagtgagccttgatcacaccactgcactccagcctgggtgacagagcaagatcttgtctcaaaaaaaaaaaaaaaaagacaaggcccaaatgcagagtgtgaaggatttagccaggcaaaagcagaagatgagataaaagagtggtccatgttctgaaatgaggtgtgcaaaggtcctggggcaggagtccacttggtgtttcagggaacaaacgaggcctccaggctggaatggaaagacagcggcaggagatgaaactcagtagggacaggatcatgctgctgggggttttgaactttatcttaaagctactgaaggctgagagaatggcaggttgagaaatacccagggtagctctggaagccagctgcctgggtgccggacctgtgtccatttttgttcatatctgtgcattcagtgcctattacaatatcaagcacctagaaggcactcctgaattttttgttggatgcatggatggatgaatgtgggggtagataggtggatgggtggatgggtgggtgggtagatgggtggatgggtgggtgggtggatggatggatattgggtggatggatgggtagatacgtgggtaggtggatggatgggtggataggtgtctattattttctccctatggtgagcaagtcagtcaacatcacaaagcctgtttctttacctaaaaatatagaaataaaaatggtgtccacctctatggtcattgtgagaatgaaataaatcatgttaaaagcagagccctgcacataagcactcaaaaatgttcatcattttttatgttattattaattccctgtctccaccataacaatataagctctataatctgcatatttttgttcatatctgtacattcagtgcctattacaatatcaagtacytagaaggtactcctgaattttttgttggatgcatggatggatggatatggggtagatgggtggttgggtggataggtgggtgggtagatgggtggatgggtgtgtgggtggatgggtggatgggtgggtgggtagactgatgggtgggtgggtgtgtgggtagattgatgggtgggtgggtggatagatggatggttggatattgggtggatggatggatgggtggatggatggatattgggtggatggatgggtggataggtgggtgggtggatggatggatggatattgggcagatggatggatgggtggatggatggatattgggtggatggatgggtggataggtgggtaggtagatagatgggtggataggtgggtggatggatggatggatgaatggaagggtggatgggtggatgggtgaatcagtcagtggatggattaatctatcaatctgttgatctcaggataagattgagagaagccactggattgaagtttactttgggttgtcatctkattttaaccctcagggtacagtagctagattcctgttccctaccttcatcccccagatctttctaatacgatgactacatctttatttcctttgtccacagggttgataggcactcccaaaagggagacctggctacagctccgagctgagctggaagctctcacagacctctggctgacccactccctgaaggcactaaacctcatcaactcccggcaagtggcagccctcattttcctctgtgccactgaactttctcgcagtagacagtggtggctcctgcatgtccacacttgggagaattggactcctcaaactctcacttgtacactttccaaatatwttttttttttgatayggagtctcactctgtcgcccaggctggagtgcagtagcgtgatctcggctcatcacaacctctccctcccaggttcaagcaattctccggcctcagcctcctgagtagctgggattgcaggtgtgcaccaccacacctagctaatttttgtatttagtagagatggggtttcaccatgttggccaggcttgtctcgaactcctgacctcaggtgatccacccgcctcggcctcccaaagtactgggattgcaggtgygagccaccactcccagcccaaatatttaataaagcttaagtgcacaaggctcagtggataccttggagcatagctgagctaatagcggcagagacttttcagggcccaacaggtttccaggyttctggattctcccaaaagatgagaactggcatgcaggctccagcttactctattccccacctctccctcttgtcctacacttgttccatatcrctcatttacattacccrcaactatttaagtgtatggcccttgcaataaacatttgctttttatataagaaaagtattccccccatactacatttcactatgtcaggcagcttcaggcttaaaagagaggaacagcctgagaatccttgggccctaacatacctgaagatgacagccatagcctccaagcctaccagatttcccgccaactgcaggctcatgcagcaagaggaggcctggccttgtggtccctctgagttctgatccacagtctcctttgtccttaggcccaactgtgtcaatgtgctggtcaccaccactcaactaattcctgccctggccaaagtcctgctatatggcctggggtctgtgtttcctattgagaacatctacagtgcaaccaagacaggtagggagaagccacacctcggcggggatacagggttggagggtggggttagctttccatcctgggartggggtgtttaaggaacatgacaccacagaaatggatggagtgtgcctatggccatgactcagattcccaaaacagcccccatagaccacatgccttaacctctgcttctaaagaaattggttaggaccacagttttccaaagtgtctgtatgagttcagatacaggcaaagctgctgtaacaaacacaccccaaatgcaagggcttgcaaaagagtcaaagctgatttctccctagtagaacagacagaggtgagtgatccaggctggtggggtgaccctgtcctcaragacatccagaaacccaggtctctcccgttttatttttccaccatttcttatggttttattctcatgtatggggtcaaatcagagtcctagcccatcctcattctagcaggtctggtatttgaaggccaagctcagaaggctatgtacattacattctactcacttcctgttagccccagcttagtcacgtggccacaagtagctgccagggaagctgggaaatgtagtccatagctgastgattcatactgtcactcaatctggaatgcagtggcgagatcatagctcactacagcctcaaactcccagcctcaagcaatccttccacctcagcccccaaagtactgggactacaggcatgagccaccgtgccaaaatatttttaattagaarccttttccattgttttttctctagagcaaaaaataaaaaaataaataatttatagtactttggcagcattttcttggagcaattttggttttactgaagttctacgtccaaacattatatgaaagtgccttttgattttaaaattatagtagtaggggccaaaatggttgttgaagatttttcaacaagatcctgtcttttcatttttcccatttttcctgcatacctcaagtacctttgcaggtttatttcgaatctcttttttaaataatatttttatktttaattgtggtaaaattaaataatgtaaaattttcaccatcttaaccttttttcttttttttaagatggagtttctctcttgttgcccaggctggagggcagtggtgcaatctcggctcactacaacctccgcctcctgggttcaagcagttctcctgcctcagcctcctgagtagcaaagactacaggcgtgcaccactacaccgagctaattttgtatttttagtagagacggggtttcaccttgttggccaggctagtcttgaactcctgacctcaggtgatccatctgcctcggcctcccaaaatgctgggattacaggcatgaaccaccgcacctggccatgcactatacgcttaaaaatggttaagatgggtcaggcgcggtggctcacgcctgtaatcccagcactttgggaggacgaggcaggtggactgcctgaagtcaggcagttcaagaccagcctgaccgacatagtgaaaactcatctgtactaaaaataaaaaaattagcagggcatggtggcgggtacctgtaatcccaggtacttggaaggctgaggtaggagagtcgcttgaacccaggaggcagaggttgcagtgagccgagaccaggccattgcactccagcctgggcaacaagaacgagactccgtctaaaaaaaaaaaaaaaaggttaagatggctgggtgcagtggctcacgcctgtaatcccagtactttgagacactgaggtgagcagatcacttgaggccaggagttcgagaccagcctggccaacatggtgaagccccatctctactaaaaaatacaaaaattagccaggtgtggtgatgcgtgcctacagtcccagttactcaggaggccgaggcaggagaatggcttgaacccagaaagtggaggtttcagtgagccgagatggcaccactgcactccagcctgggtgacagagcaagactgtgtctcgaaacaaaagtgtccagcgcagtggcatcaagtgcattcaaatggttgtgcatccattgccacttctacatcggacagctgcagagacttgggagcctgctctaacccctgcgctgcctcctcctgctgtgttgccctgggcaagctactgaccctcgctgtgtttccggctgtcatcatccttcatgtggggatgataacagkgctcacctcagaagtttgctcaagaacgaaatgatgaataccgggcctttgggagcacagctgcaggcaccragctcttaatgagcgggtattggctgcaatccggggtcctcacagagcgttttttctttccttcctgtgtgcgtgcagggaaggagagctgcttcgagaggataatgcagagattcggcagaaaagctgtctacgtggtgatcggtgatggtgtggaagaggagcaaggagcgaaaaaggtacttcttccacctctcagactgcrttttcctgctctttygagcacccctcgtggtcttcaagggctccttccatgatttcctccactccccgtggctggctgggtcctccttcccaggctccttgcttgccagtccattccatttgcaaattgcagaagcatcctgagtaatttccttctacaaatccccctctctgcctctggctgctgcccctggtagccctggattgtttctgggacaactgttcrggagcctagagacgctccggcagggcaggctggtggggggccagtgcacgtgcatgtgttttatttaatacttactgatcatatgttccagcaacccttcccagttaataaagacagcattaagctaatgaaaaagaaaatcctgcatttgtgatctcgggcccgtgaggagagggcagggggttctggtggccacatctctgttcttggaaaagaaacagctgccaaagtcctgggtctggatcggtcaacagcgccccagagaggctgccacccccaacccggaggcctgggaagtggattgttaatgtcacagaccttaattagggggacctggtttcccccatctctgcctggcagcaaatcccaaggaaatgcaaaaatgttcagggtctcagcagatgaaacccagaagaagagggaagccctagggtcctgggagagggccccgggagagaggagcttggaaggctttgcaggcactgttccctccacctggaaggctcctcccctttcctgggagatgtagtctctattatccgccgccatgagccccgctaagaaatgggagctgcttctgagagagaaggggagaagtgatattgaggggcagctgccagggtcagtcgcactggtgtgtggccaggctgtggctggcatcttgagttgctgacctaaccccatgcccttcaccaccgtaactttattgctaacatcatcattgtactcaatcctccaaaaactcctacaaagtgggtatcattgcatccctttttttttttttttttttttagagatagggtctcackctggcacctaggctggagtgcagtggyacaatctcagcttactgcagcctctacctactggactcaagcgatcttcccacctccgcctctaagtagctggagctatggacaggcactaccatacctggttaattttttgtatttttttttttttagagagatggggttttgccatgttgcctgggctggcctcaaactcgtaaactcaaacaatctgcccaccttggcctcccagaaagctgggattagaggcatgtgcccggccacaccccattttatagatgacagaatttgagactcagaaaggttaattaatttgcctagggtcacacatctagcacatgcaaacctacctgtgtcatgctccaaacgcctggcagggaggagacggacttacgagtttcaaacacggttggttttcacccctgagctagtcaggcaagagtagagtcagccaaagaagactaggtacacacccaccacacacagaactcccataaaagtcccagtgtctgaggcagaagccycagaacgttagtgagaaacagtgtccaccagcagctctctcagcctgacaaatggaagtcattagcccaggccaccggamatctgagcggtgtaaaatatggccgcaggaccaggggccttgactgtttccgctgacagtgttgttaatatctccattttagtgggtgatttgtctccacctctycacgagtgatgaatccactggcactctggaacctttaggcctggggtaaaggcggctagaacattctctttcttctacctttgctcattctctcccagaaaaatgaatcacactctttttttttttttttttttttttgagacagaatctcactctgtcgcccaggctggagtgcagtagcatgatctcggctcactgcaacctccacctcccaggttcawgcgattcttgtgcctcagcctcctgagtagctgggattacaggcatgagccaccacatgtggctaattttttgtaattttaatagagacggggttttgccatgctggccaggctggtctcgaactcctgacctcaggtgatccgaccacctcagcctcccaaagtactgggattagaggtgtgagccaccacactcagccaaattacactctttaaagagggcaggattggccaggtggcaaccagaatctatctttgcaaagaaaggagggcttggccgggatgagggcagggtgggaatgctagggcagtgagaaggcgttgaagagatgagagctgttcccataggagatggttttctgcttcccttgagctgagaattgtttagaaactacagaacaaagagaaaaggatacattcagaggactttgcttgagaaacttaccttctttttttccctctctctcttcctcttttcattccttctacgaatatttcttgagcacctactatgtgtcaagagccatgcggtgcagcaatgagcattgcattccaagctcaaccttcctggggcctttgcacttgctgtgtcttctacctgcccccacgttcccccacatctttgccagggcctgcttaaatgacactccctggagaggcctttcctgacccagctctcaaaagtagacacacaamgctgctttctaccctatctcattctgtttccttcctagcacttaccaggagatgaacttatcttgtttatttcttatctgtgggtttatctgagcctccaatgaaagccccataagtgtttgtgacctgtacagaaggccccactggggtctgcccctggcatctttatagatcttcctttgctcactgagggattctcaatctgggatgcccttcccttcagtgacctgctaactatgaagcacttattcttttttttttttttttttttttttttttgagatgaagtttcactcttgttgcccaggttggagtgcagtggcatgatctcagctcactgcatcctctgcctcctgtgttcaagtgattctcctgccccagcctcccaagtagctgggattacaggtggccaccaccacgcccagctgattcttgtattttagtagagatggggtttcaccatgttggccaggctggtctcaaattcctgatttcaggtagtccacccgccttggcctcccaaagtcctaggattacaggcgtgagccaccacgcccggcctcctcattcgttcttcaaggtctgggtctcatgcgcttcttgtcccctgagacacccccatcccattcacttctaccaaaaaagaggctgcttcctctggctggctcccatgacattttatttacacctgccttaatgatttctttacattcttcctaaggtagtcttatttattatcttttaaactactgagaaacgccagcattctttcttccatatacatgcacatatatatacaatttgtcctgcatccttcctttttcctatttacctagatatgtccctagctactcaggaggctgagtcaggaaaatcagttgagcccaagagatcaaggctgcagtgagccatgatctgcattccagcatggacaacaaactgagactccatctctaaaattaaaaaaaaaaaattaatgaaacgaaattcagctgggcacaatggctcatgcctgtaatcccaacactttgggaggctgaggtgggtggatcgcttgagcccagtagtttgagaccagcctggtcaccatggtgaaaccctatctctacaaaaaatacaaaaattagccagatgtggtggcatgcatctgttgtcccagctacccgggaggctaaggtaggaggatcgcttgagcctgggaggttgaggctgcagtgagcagagatcatgtcactgcactctagcctgtctcaaaagaaagaaagaaagaaaaaaaaaactccacatcatgacaataacttgaagcaggtaccacctgctgcaaagaaaaggaaaagataaaaacgaaagctataaagaaaacagattagtgtcatcctgacctggctagctacagtggcctgctgaagactctccaagaccagctctgtttgttcacagtggagactgtcaatgctggggaggggttccagcaccgagctgtgactttcttcttgaagtaacaggattcagagcactgcagcctccaattcccggcctcaagcaatcctcccgcctcagcctcccaaagtgctgggattacaarcgtgggccacagtgcccaggcaagaacaaatttttaaaaaggaatcgctttcccattgtgcaatttaacaccatgtyagtgcaccgcctaagaccacgctggtaccaacagaggcgagagggtcaaacagcgaacacgctgggcagtgctggataagccygtcagagcaggctctgaatagaaatrgttggccatactggtgggtactggccagatgtgggtctgccagcaacrtcargtgccccatagtttgggaagtccccacrtgctagacttaactgggttgacttctcacatgccctctaaccacrggcgtggaayccgggggcaggggcggggccataaccttgtggctggtgttctgtgtttcagcacaacatgcctttctggcggatatcctgccacgcagacctggaggcactgaggcaygccctggagctggagtatttatagcaggatcagcagcatctccacctgccatctcaccctcagaccccctcgccttccccacctccccaccgagaactccagagacccagatgttggacaccaggaaggggccccacagccgagacgacgtgtccagtgaccatctcagaagccgtccatcagtccaaatgggggttctgagaaggaaagtacccaacattggcttcggagtatttgactttggggaaaagggctggctcggagtctagactcttctgtaagactcacagaacaaaagcaaggaattgcyratttggggggtgcctggtgatgaggaggggatgggtttgtcttgtcttctttttaatttatggactagtctcattactccrgaattatgctcttgtacctgtgtggctgggtttcttagtcgttggtttggtttggttttttgaactggtatgtrgggtggttcacagttctaatgtaagcactctmttctccaagttgtgctttgtggggacaatcattctttgaacattagagaggaaggcagttcaagctgttgaaaagactattgcttatttttgtttttaaagacctacttgacgtcatgtggacagtgcacgtgccttacgctacatcttgttttctaggaagagggggatgctgggaaggaatgggtgctttgtgatggataaaaggcattaaataaaaccacgtttacattttgaagtggggtaggatgtggttactttattaccactcttgaggcttccaaatgtgttgtcctttttaaagactttatcagttgcagaagaatagaatccaactcacactggcttaagccaagaaaaatggggtggggggagggaggaaggagaagagggagaaaaggagggaggcagaaagggaggggaagaaggacaaagggacaagtgtctccaggaactttaggtggtatctgtctggatccgggtggtcaaatgaatttctctcatgtggccgtaattctcaggcaggctgttccctgtgtggcaaagacggctctacgagtccttcagcaaaaccacacagacagaaagagaccacattcttcaccgtggtgcagcgaaagcctcaggactgtaactcgttggccaaatctgaggcttaggcaactcacggagctggatttagggttggatcctgtcacgaacagcaagttgaacaagctgatcctccaagggaaagaaaatcagtgagctgttattcaaagaattgggggaattgagggtcgggctggaaaatgcaactgacttccgttctaatggtaggacttcatttcccagtggatgggacatgagtgaaggatccagtttaaggggcaaggagggaaatctggagaagttctgaagacatctggagcactgccactacccatagtggaccaggcaggacctgggtctatctgattggatgctaagcaggaatataggctccttccttattaatgctggtaaaatcgtggattatcagtcagctgacccatgtcatgggagatggagatctctgccactggagtctcagagctagaatctctgatgattagaaaactgtcaccggccaggcatggtggtgtatgcctgtaatcccaacactttaggaggccaaggcatgtgggtcgcttgagcccaggagtttgagaccaacctgggcaacatggtgaaaccccgtctttacaaaaaatacaaaaattagctaggcatatagcatgcgcctgtagtcacaactactcaggaggcagaggtgggaagagctcttgagcccaggaggttgaggctgcagtgagccaggttcacactgctgcactccagcctgggtgacagagcaagaccctgtctcaaaaaaaaaaaaaaaaaaaaggcatcactaagggtcagatagactcccttactagaccctgagcttctcagggggtaggtactgttggtttcatctctatatccacagaatcaagcacagagcctgacacaaaatagaatcccattatagatggcatagaatgaaggatggaaatatgaatggaaccacagccagatggatgataatatgggtgaatggccatttggacaaatggataaaatggagtgttaaatagttgagtatgtgggtagatgaatggttggttaggtgattagatgattaattggaaggtgggtgggtaattgggtgactggaagatggatagatgaataaatggatacctacttgggatgactagatggatagttggataaatcatgggtatatggacgaacagatagattattggatagatgaccagatcgataaccaagtagttgtgtggtgacatgaatgaatagatggtggtttggatgagtgaatggctgggtggttttacggaaatatggatagatggttaggtgggtgagttagtggataaatgagtgggttgtttggacaggtagatggatggaatgattgatggttgttggtggttgataataatattatgatggatatgtggacagtttaatgggcaggtggatggaaagttaaatggaaatgaagtgtgatggttagatggatagagagtggaatggaagtgaagaatctttagcattgcctaaaatacctgagtcagcctcactaatatctgtcagcttaggtttcttctagaatgagtggaggagctttactggataagctgacttctagctggagtggataatgagactagagtagagccacccagtcaccaaccatccactggtagtcagtgatgtgaatactcctgaatccccctgactccccattctttagcacccttgccacacaggaacccacttataatcatgatctacccatctctcccttcctgctaccatcaaaacctgctgtcagggaaaattctgtttagggtccaacaaagggtaaattacttattaagaaaattttttcttttagtaggatttcattagaaacacaagtagaatttcagccatgcacacaggaggttttgggtgaaacagatcttccccttgaccctgaaattaaactacgtaggtgatcaactacttttttgttgtgatgagtcaatgtcaaagactagttctgacaaaagttagcagtccacagtctttaaggtaagtgttttaacttgaattccttctggatgactcagagcttctgctgagtaaggatggtatttttctcatctctgtatgctcattgcccatcacagagcctggcacagatatgccacttaatgaatgttggatgggtgaatgagtagataagtggtggataagtggatggatggatggatggatggatggatggagagatgggtgaatagtagatggatggatggatggattagtggatggtggatggatggagggatgggtgaatgagtggatgcatggatggatgtagatggatggatggatagatggataggtgaatgagtggatggatggatgataggtggacagatgggtggttaggtggatagatggatagatggatgactgggatttcatggtcccaggcttctagacttcactgtttccccagcagtgtcttgctgctctccagaacattcttagaagtagagtaacaggactattcaagacacacatacaaaagcttttggactctcagaagtccaaccttgactccagaacttcctgagcagcccagcagaaggatagagatccacaaaagtgcccaggttgacctcaaggatgaaagaatttgcatatccaagggatttagaagtcagagagctaccatttggattttttccattgcaaatgacagaaacactatcaaaatggcttaaacaaaacagaattcatctgctcacttgactaaaagattcaagaatgagtgacctcagaccccttcaaatgcaaaactcaagacccatctttaaaattcaatttatttctctgaatccctggactctgtttcctctcctttggcttcgtttgtaggcaacatccacattcttagagtggaagctgtggaagacgtaatccaacaaagattttcatgagtaaagcattgcttaatttttaaaagataactgcctaggacagataatcaggttaaatgtattatgtgagttaatgtcctttaaatattttgagttgtttcttcctgagttacttgcagccaaaagcgctccaactgatatagcacataataaatagcattactagtttttttttttttcttttttttcttttttttttttgagacagagtcttgctctgtcacccatgctggagtgcagtggtgtgatctcggctcactgcaagctctgcctcccgggttcgtgccattctcctgcctcagcctcctgagtagctgggactacaggtgcctgccaccacgcccggctaatttttttgtattttttagtagagacggggtttcaccgtgttagccaggatggtcttgatctcctgacctcgtgatccacccgcctcagcctcccaaagtgctgggattacagatgtgagccaccgtgcccagcctttttttttttttttgagacagtcttgctctgtcacccaggctggagtgcgatggcatgatctcggctcactacaatgtccacctcccaggttcaagcgattctcctgcctcagcctcctgagtagctgggattacaggcgcatgccaccatgcccagctaattttgtatttttagtagcgacagagtttcaccatgttagccaggctggtctcgaactcccaacctcaggtgatctgcccacctcagccttccaaagtgctggaattacaggcatgagccacagcacctggccaacactttatattttttaaaatgcaactggttcttgttttttggttggtggtggtttttggtgtttggttttgttttggtttggttttgggggatttttgtgtgtgtgcgttttctggttttgattgttttttagacagggtctcactcttgttacccaggctggagtgcagtggcacagtcatagctcactgtaacctcaaactcctgggcttaagcgatctccccaccttaacttctggagtagctgggattacaggcatgagccaccacacccagctaatttggttttaaaacttataaaaaaatactcaggccagacatgatggctcacacctgtaatcccagacctttgtgggggccaaggcgggaggatggcttgaggccaggcattccataccagcctgcaacatagtgagaccccatctctacaaaaaacaaaaataaaaaaattagccaggcctggtggtacacgcctgtagtgcacgctactcaggaggctgacgcaggaggctcacttaagcccagcagttcaggctgcagtgatttatgattatgccactgcactccagcctggatgacagagtgagaccctgtctctaaaaataaaaataaaatataaaaaaatgtcagtgcagtggcttacacctataatcccaacacattgggagccggaggcagaaggatcacttgagctcgggagttcaagatcagcctgggcaacatagtgagaccctgtctccacaaataatttaaaaaattagccaggtgtgacagcatgcacttatagcccaagctaccagggaggctgaggtgggagaatcacttgagcccgggaggtcaaggctgcagtgagctgtgatcatgccactgcacaccagcctgggtgacaaagcgagaccctgtctcaaaaaaagaaaagaaaaaagttcaacctcacctataacaagagaaatgcaaatacgttcattgtccacattagttggacaaaaatctgagagtttcatgactcacggtactgatgaagctcatatattgaaaacgatgaatggattacctataagagcacctttttttaaatttttttaattttttatttttgtagaaacagggtctcactatgttgcccaggctggtctcaaacccctggcctcaagtgatcttcccgcctcagcctcccaaagtgccgggattacaggcatgtgccatcttgcctggccctataggagcatcgtaaaggtcagatgtcagttttggagacttctctgtcaataacctgtggccctcaggagcttgtttccagccttggtttcccccaaacagcatcactagccctttctctgtgtgccccacagcattgggtaaaggctgtggccatgtgggatgtagcaagaaagacccttctctgaggccccattgtccaacacaaggtggtctcagtggtctgagagccagggacccctgggaaaatcctgttaacaagtttcaaagaggctggaatatatccactcatccatgctcctacagctcacccattcacaattttcagtgtgatgaaggcactctcccacctgtcactcatatgtctgatttcatcagcctcctgtaagcagctgcattccttaatttcttttgagaccaagtctcactctgttgcccaggctggagtgcagtggcatgatctcagctcactgcaacttctgcctcccgggttcaagtgattctcatgcctcaagcctcccaagtagctgggactacaggtgtgagctaccacgctcagctaattttcatatttttagtagagatggggtttcactatgttggccagggtagtctcgaactcctgacctcaggtgatccacccgcctcagcctcccaaagtgctggga

SEQ ID NO: 96150 - DNA, 18380 bp, Homo sapiens
cacacctcggctaagggctccggcccaagtcacctctggctgcctggtcctctggtggccaccctgctgtggctccctccccaacccagcctgtcctcttcaacccccttttctccctcggctacccctgcaaagactttgaagccagggctctcatggagtgaaatgtcaccagctgcagcagcagctgctgcctcggctgagggggtccctgccccaggaggccctgtggctcctctggtgtcatgtgtcacctgggtccctgtgggctaggtgccttggctgggggagtgaggaggccctggcctccccctggcctgctggatctcctgctaactgttcccaacacatctgctttgtcagcctctgccatctccaacatgcagccttgcctctcctcctgttgtcgccactgctcaggctcaaatctccaatgccttcgttcttttttttttttttttttttttttttgagagagagtcttgctctatcacccatgttggagtgcagtggtgcgatctcagctcactttcaacctccacctcccgggctcaagtgattctcctgcctcagcctcctgagtagctgggattacaggcgtatgctaccacacccggctaattttttttttttttttttttttgagatggtatttcgctcttgttgcccaggctagagtgcaatagcgtgatttcggctcactgcaacctccgccttctgggttcaagcgattcttctgcctcagcctctcgagtagctgggattacaggcatgtgccaccatgctcggctaattttttgtatttttagtagagatgaggtttcaccatgttggtcaggctggtcttgaactcctgatctcaggtgatccacttgcctcagcctcccaaagtgctgggattacaggcatgagccactgcgcccggccacacctggctaatttttgtatttttagtagagaaggggtttcaccatgttggccaggctggtctcgaactcctgacctcaagtgatccacctgcttcggcctcccaaagtgctgggattacaggtgtgagccatcgtgcctggccttcttttctttttttaagcccaggttctcgctctgtcgtccaggctggagtgcagtggtacaatcatagctcactgtaacttcaaactcctgggctcaagtgatcctctcaactcagcctcctgattagctagaattataggcgtgagccaccgtgccctgctaatttatgtttttaactttttgtagagatggttcttactatgttgcccaggctggtcttgaactcctggcctcaaacgatcctcttgccttggccttccaaaggaattataggcataagccactgagccctgccccgagattctaatatgtgcccagcactgtgcaaaaacccaaattagcaatgaaacaagacaaaaccttgccctcatggagctgcctttctagttaggcagggatggacaacagaaaatgtactcagtgaaagagtatacatgtgaaagggcatatgaaagaagaataaaatcaaagtaaaggggagaggagtggtcagggcaggcctctcagaggaggtgacatttgaacttaggcccaaaggaggagaaggaactgagaaatggggtgttctaggcagaaggagcggcaagtacctgactccttggacaaaaaagagcttggtgggttccaggaatagcaaagaggtctgtgtagctggagaggagagagggagggagggccagcatggtgggagatggcagcagggaggttgagaggtgccctttaaggccactgtgaaaagcttggattttactcccagggggaagctaccattaggaggttttaacagtgacatgtttgatttatggttaaagagctgtggcatgcacctgtagtcccagctactggggaggctgaagtgggaggatcacttgaggccaggaggtcgaagctgcagtgaggtgtgattgtcccactgcactccagccctggtgacagagtgagaccctgcatcaaaaaaaaaagctcagcggctgggcacggtggctcatgcctgtaatcccagcactttgggaggctgaggtgggcggatcacgaggtcaggagatcaagaccatcctggctaacatggtgaaaccccgtctctactaaaaatacaaaaaattagctgggcgtgtggcgggcgcctgtagtcccagctacttgggaggctgaggcaggagactggcgtgaacccgggaggtggagcttgtagtgagccgaaatcacaccactacactccagcctgggcgacagagcaagactccgtctcaaaaaaaaaaaaaaaaaaaaaaaagctctctgattttagctgttaggtgggagatgggttggaggataccaaagccagcttgcaggctatggggataaagaaaacacctggatttcggacctactttataggtagaggttggcagacatgctgagaaggatggatgtggggtgtgagaaaaggggagacagcaagctgcgctcctcatttttaatttttatttatctatttttgagacggagtttcgctctgttgcccaggctggagtgcagtggcaccatctcagctcactgcaacctccacctcccgggttcaagtgattctcctgcctcagcctcctgagtagctgggattatgggtgtgcgccaccacacccggctaatttttgtattttttagtagagacggggtttcgccatgttgtccaggctggtctctaactcctaacctcaggtgatctgccctccttggcatcccaaagtgctgggattacaggtgtgagccaccgcgcccagccccaatccctatttttcagtctagtggatgagtggagggtggggccgtttgctgagatgcagaaagatcagggataggtggagagggagctgagggggcaactttgaggtccaagcgaggatgtcaaggaggatgtctgtctcctccaacaaggtaggctcattccagcctcacggcttttgctgttctgtcttcccatgtgcaggaaatggcctctctgcatcttcacatacggggattttctcagccttctggctttggctcaaatctcacctccttggcgtccttcacccatccctccaactaaaatcccgaactcctccacctaaagactcaaattatcctgtttaaatcctgattgcgctgggcgcggtggctcacacctgtaatcccagcactttgggaggccgaggcaggcagatcacctgaggtcaggagttcgagactagcctgaccaacatagtgaaaccccatctctactaaaaatacaagaattagccgggcgtgatggctcatgcctgtaatcccagctactcgggaggctgaggcaggagaattgcttgaaactgggaggcagaggttgcgatgagtggagatcgcgccattgcactccagcctgggcaacaagagcgaaactctgtctccaaaaaaaacaaaaaacaaaaaaggcctgatagcactcaccactattgttaactttctatcttcccaatcagattgtgggctccagtagggcagggtccacatcttggtcttgttcaccactaaatccttagtgcctagcacggagcccaccatagagaatagactacatgaattgtagagtgagtgaataatcctgttggccgtatgcactgttaggagggtgtgtttgagatacagatgacacccagggtctcacattcttgcaggagggaaagagacgtcagccctgggtcccagaagaggccactgacccagtgggagttcagggaaggcttcccagaggaggtggaggtgacagctgcagctataagggaaggaagaacagagcgttatgcagcatgtgaaggctttggagacttgtgagggcacgaaccgggctcactatcccattagacaaaagtggctgaggaaggatgaaactgtgtctaactctgcctggtgaccgaaatcttgtccatgggtgacgcttaagaagtgaccctcggccgggcgcagtggctcacgcctgtaatcctggcactttgggaggccaaggcgggcgggtcacgagttcaggagatcgagaccatcctggctaacacggtgaaaccccatctctactaaaaacagaaaaaattagccgggtgtggtggcgggcacctgtagtcccagttactcgggaggctgaggcaggagaatggcatgaacctgggaggcagagcttgcagtgagccgagattgcgccactgcactccagcctgggcgacagagcgagactctgtctcaaaaaaaaaaaaaaaaaaaaaagtgaccctcataaaaaaattagctgggcacgatggtgcacactagtcggaatgctggggtgggaggatgacctgagtccgggagtcagaggttgcagtgggccgagatcgcgtcacagcactccagcctggcgacagagtgagaccctatcaaaaaatagcagcaggccaggcgcggtggctcatgcctgtaatcccagcactttgggaggctgaggcgggcggatcacgaggtcaggagatcgagactaccctggctaacacggtgaaaccccgtctctactaaaaatacaaaatattagccgggcgtggtggccggcgcctgtagtcccagttactggggaggctgaggcagaagaatggcgtgaacctgggaggcggaggttgcagtgagccgagatcgtgccactgcactccagcctgggagacagcgcaagactctagctcaaacaaacaaacaaacaaaacagcaacaacaacaacaaaaccatcctcccctcccgaggggacagaacagaaacgaatgggcgagtgccgggccaagcagtgggtctccagcaggtggcattaaaataggaattttggctggggacggtggctcacacctgtaatctcagcactttggaaagcccaggcgggcggtcacctgagggcagaaccagcctcgccaacatggtgaaatgccatctctactaaaaataaaaaattagccaggcctggtggtgggtgtctgtaatcccagcaactcgggaggctgaggcaggagaatcgcttgaaccaggggggcagaggttgcaatgagtcaagattgcaccaccgcactccagcctgcgtaacaagagcgtgtaactcttgtctcaaaaataaattaaataaataaataataaaaataaaaaagaatcttcattcatgggaagtcgagaacacatgaaaacaagtaaaggccgaagcgcagtggctcacgcctgtaatcccagcactttgggaggctgaggcgggcggataacctgaggtcggaagttcgagaccagcctgaccaacagggagaaaccccgcctctactaaaaatacaaaattagccgggcatggcggtgcatgccagtagtcccagctactcgggaggctgaggcaggagaatcgcttgaacccggaatgtggaggttgtggtgagctgagatcgggcaattgcactccagcctgggcaacaagagcgaaaccctgtatcaaaaaaaaaaaaaagaaaaaaaaaggaagaaaaggcctaaaggcgccgggcgcggtgggtcacgcctgtaatcccagcactttgggaggccgaggcgggcgaatcacgaggtcaggagatcgagaccaggtgaaaccccgtctctactaaaaatacaaaaaaattagccgggcgtggtggtgggcgcctgtagtcccagctactcgggaggctgaggcaggagaacagcgtgaacccggaaagcggagctggcagtgagctgagatcgcgccactgcactccagcctgggtgacagagcgagactccgtctcaaaaaaaaaaaaaaaaaaaaaaagaaagaaagggcctaaaggctcctcgcggcttccgtattacggaacacacgcacaaaaatggcggcgacctggtttacaggggctaaaaatggtcacgtgataaaccaacttccggtctttygcccaaagcacgttccctacttcctgtgctcttgcrgagacgcgcgcgtcgrggtttaacgcgtttctgggccgccgtaagcccggcctaggggcagctttgactcgagagccggctataggcgcatggaaggttccctggaacgggaggcgccagcgggggcgctggccgccgtgctaaagcacagctcgacgttgccgcccgaaagcacccaggtccggggctacgacttcaaccgcggtgtgaattaccgcgcactgctggaggccttcggcaccaccggcttccaagcaaccaacttcgggcgcgctgtacrgcaagtcaatgcyatggtgaggaccgggcggaatttctagggacgcggaggggcgtggcttgtagaaccaacgcggtactagacgggggcagcgtttccagtggaggggatatgtcttttatttgagytgcccaatagttggaggaaggcgggacctattctgggcgggagtttctgtcctgggaaggggattttgcactctggtagttacatgctggtacggtaacctgaggaggcgaggactgattcttggtgtgggggcgggttctaggtacatttaaagctttctggaatgggcggagcctggggcaagacaaattaagggaggatatgggaggaggagcctaagtctgggcggttcttgaatttagatttgcttttcccagcggggaagggaccggatctgaaaggagatgctctctgattcctaaaagggtgggggctggctgggcgcggtggcgcatgcctataatcccagcattttgggaagccgaggcgggtggatcaagagaagaggagttcgagacaagcctggccaacatggtgaaaccctgtctctactaaaatgcaaaaaattagccgggcatggtgttgcgcgcctgtagtcccagctactcgggaggctgaggcaggagaatcgcttgaacccgcgaggtggaggttgcagtgagctgagattgcgccactgcactccagcctggtgacagagcgatactctgtctcaaaaaaaaaaaaaaaaaaaggccgggcacggtggctcatgcctgtaatctcagcattttgggaggccgaggcgggcggatcacctgaggtcgggagttcgagaccagcctgaccaacatggagaaaccccgtctctactaaaatgcaaaaaattagccgggcatggtggtgcgcgcctgtagtcccagctactcgggaggctgaggcaggagaatcgcttgaacccgggaggtggagcttgcagtgagccgagatcgcgccattgcactctagcctgggtaacaagagtgaaactccgtccaaaaaaaaaaaaaaaagggtgggggcaaatcctgaacgtgtgtcttgagatctggtctgggaaggggcagagtttacacaggagatgttccttggtcccctgtagaactggtcctgtatccctgaatgtgcagggcctggggtgaaatctgtttctggagcccacctggagtcctgagtctgggatttaaggccagtgcttaacttgacttggcccttactcacagatcgagaagaagctggaaccactgtcacaggatgaagaccagcacgsggacctgacccagagccgccgsccacttaccagytgcaccattttyctgggrtatacatccaacctcatcagttcaggcatccgtgagaccattcgctaccttgtgcagcacaacatggtggggacctggtgaggccgtggccttggcctctgggtcaatgggcaatgcagttattgatcgtttaagtgagatgggcagataggggtctgttataagcagaggaatagaatcaagttttgttttgtagcagagctccctcataagagtcactggacaaggatgaggttagaagttctgcccagaatgagggcaggggcttccttcttgggccaaattcactgccttgtggctgcaggtggacgtattggtgaccacagctggcggcgtggaggaagacctcatcaagtgcctggcgcccacatacttgggcgagtttagcctcagggggaaggagctccgggagaacgggatcaataggtgagaaccctgagtggtgttgggcaggggagctggaccaagggtcctggggcctgatgcctacatgcctcctgttctcaggatcggaaacctgctggtgcccaatgasaattactgcaagtttgaggactggctgatgcccattctggaccagatggtgatggagcagaayacagaggtggggctggggcaacctggaggggccagttcagtgggagtcaggggaggcatggcctgaargtcacatcctctcctagggtgtaaagtggacgccttcyaagatgatcgcccggctgggcaaggagatcaacaacccagagtcsgtgtattactgggcccagaaggtgaggacctaagcgggagcaaagtagccagactttggcatgtgttaacttatttcatctttccagcctcctggggattcagtactgttattctcagcatcctcactcttagatgaggagactcaaacacagataggcgtggtaattttttttttttttgagacaggatcttgctctgtcacctaggctggagtgcagtggtgtgatcacagctcattgcagcctcaacctcctggggccaagcagtcctcccacctcagcctctcgagtagctgggaccacaggcacatgccatcatgcccagctaattttaaaaattttttgtagagatgggggtctccctgtgtttcccaggctggtcttgaactcctggcgtcaggcagtcctcccaccttggcctcccaaagtgctgggattacaggcgtgagccactgtgcccagccaggctaggtaattttgtctgaagtcacacagataactagtggggcctcagcatccttatgctcctcccagactatctctggaacagtagaggcaacacttagcaactctcctggggcctggctcagggtcccacactcccagatgctataaaataagagctacccactccctttaattagagaatcagaacctgaaaaaaaaaaaaaaaaagctacatagtctttttttttttttttttttttttgagacagagtcttgctctgtcgcccaggctggagtgtaatggtgtgatttcagctcactgcaccctccacctcccaggttcaagtgattctcccgcctcaccctcctgagtagctgggactataggcacccaccatcatgcccggccaatttttgtatttttctacagatggggtttcaccatgttggccaggctggtcttgaactcctgacctcaagtgatccacccgccttggcctcccaaagtgctgggattacaggggtgagccaccacacccagcctacttactctttcttttttacgagacagggtctcattctgtttcccaggctggagtgcaatggcacaataatggctcactgctgtcttgagcttctgggctcagtcgattctcctgcctcagcctgctgagtagctgggactacaggtgcgtgccaccatgcctggctaattgtttttgtagagatgggaactcaccatgttgcacaagctggctctttttttttttttgagacggagttttgctcttgttacccaggccagagtccaatggcgcaatcttggctcacagcaacctctacctcctgggttcaagcaattctcctgcctcagcrtcaagttcccaagtagctgggattataggcatgtgccaccacccctggctaattttgtatttttagtagaggcagggtttctccatgttggtcaggctggtgtcgagctcctgacctcaggtgatccacccgcctcggcctcccaaagtgctgggattacaagcgtgagccaccgcgcccggccacaagctggctctttaaaaaagaattagacggccgggcacggtggctcatgcttgtaatcccagtactttgggggctgaggcgggtggatcacctgaagtcaggagttcaagaccagcctggccaacatggtggaaccctgtctctactaaaaaaacaaaatgcaaaattagctgggcatagtggcatgcgcctgtaatcctagctactcgggaggctgaagcaggagaatcactggaacccaggaggcagaggttgcagtgagctgagatagtgccattgcactccagcctgggcaacgagtgaaactccgtctcagggaataaaaaaaaagagagagaaacagctcagcaagctaagaataggctggttctttatgtgccaggcactatactaagtgttttctgtgggttttctcatataggcctcatctgtgagaggtgtttctgttatgcttataattgaggaaacagtcctagagaaattaggcaccccatccacagtcagatagtcatatagccagcatggagacgaggctctgagctccagccactgtcctgtcatgttctctgcagaaccacatccctgtgtttagtcccgcacttacagacggctcgctgggcgacatgatcttcttccattcctacaagaacccgggcctggtcctggacatcgttgagggtgaggckctagggccacagaggagaggggaaggagggctggctgagtccaaggcctgacttcggcgctcttcccccagacctgaggctcatcaacacacaggccatctttgccaagtgcactgggatgatcattctgggcgggggcgtggtcaagcaccacattgccaatgccaacctcatggtgagtgggggtggcgcttcggcccactctgcagacatgctgtgtggtgggcctatgccatgtgctgggtagacagcatgaactagacaggccaggatccctgctccccgggactgatgttctagtaggggagatagcaaacaagtgacatccacgtcagggggcagtcattgctacggggaatactaaatgatggcatgagaagagaaaggggtgctgtccaacaagaggttttggaaggaggcttctggaagtgtgagctgggagcaggggtttggggaggcatctcccaggagctatgtggttgtctcccgtgccaggagtttgtgctgctgtactagcattgagcttctggattgcaaagttcccaggagagggaacagccattgcaaaggctctggggcgcctgaagtaatccaggaacagctgggtacctggtgaggggaaggtggagtggtgagggccaggaggtgatgcagggaggtgccacagggagcctgctgggccctgtgggctgaggcggggctttggcttttgcactgagagaagtgggagaggacttgactcgggttcccatgctccccctggtggccatgtggtgaacagatggtggcaggtgagtgagaactccagtccaggacagtggtgaccatgcagggatcaggaggcaggcggtggttggatttggagggcttctgaagatagagttgctggcagctcctgccttgcagatggggcagggttgttgacacctggctgttgggtctggggaaacacagccatcgttgcccagcagctctagtgaccccagacattgacatgggccctgtctgggagcgaatgtctgtgaagggcttccttcatctgggacacacctctcagcctgtttggctacggtgtcctccctctgtgtctgtcbcctgtgactggctgactgggcccaccgtgcccccgcctccccacagcggaacggggccgactacgctgtttacatcaacacagcccaggagtttgatggctctgactcaggtgcccgaccagacgaggctgtctcctggggcaagatccgggtggatgcacagcccgtcaaggtaagcgctggctgggtggggcatagggtctctgggacgatgagtgtgggtcccatggcttacccaggttcccccctacccaggtctatgctgacgyctccctggtcttccccctgcttgtggctgaaacctttgcccagaagatggatgccttcatgcatgagaagaacgaggactgagcggctgcggtcccaggaaggtcttaccccctcttctatttattaattkgcagacccagcccctcccctactttttggtcagctacgtctctagaataagatggtatctgaagtccttccatgtctgtgtctcggtccttggtcctgttggtgggtcccctggcttcagcctgctccatcctctgcctcataggcctcctctygccagcactggacgctgcctcccatggcggtcagcaggcagggctctgttgggtggtaggccagcgactgcaccacacyggaacccacaggcagggccagagccagcgcaccctgtggagcgaggggtagggagtggttatctgtggctgggctgtaccctggtttctgaggtccctgggcaccccccatctcagtcctgcctgaagccctcagtcacctctccccgaccttcagccacctgcctctaattgcctcctagacactgcaaaattaatctacctcagactgagcccctcagtagctctgtcctaccaggtgttcaggccgcaagtcttgggagcctcttattgattttttattttttaaaatagcagagatggggtcttaccatgttgcccaggctggtctcgaactcctggcctcaagtgatcctcctgccttggcctcccaaagtgctaggactacaggtgtgagccaccatgcctggctttgggagtctttttctttttctgtttttttttgagatggagtcttgctctgtcgccaggctggagtgcagtggcgccatctgggctcactgcaacctccgactccctagttcaagcgattctcctgcctcagcctcccgagtaggtgggattacaggcacgcgctaccatgcccagctaatttttgtatttttagtacagatggggtttcaccatgttggccaggatgatctctatctcctgacctcgtgatccacccccctcggcctcccaaagtgctgggattacaggtgtgaaccaccatgcctggccgggagtctttttcttgtaccacatgttcctctatcagttattcctcttggctctgcttctagaccatgtccagagactgctgattttctgccactaccatgtttggagcatgccttgctcacagcttgcctgttccctgccaccagctgggctccatcctgtccatttggcagccccaatgatccccacttcccctggtcccaacacaatgtaaacagttcctcaagcaagccatgcttcctctttccaccttgaaaatgtcccttgatgtgcctgccctccaaggcaacttctgttctactgggcccataagaaataggtggaacattcttgctaccttagttcctaaagcaagagcttgtccgccaagtcttcagggcccccccggttccctccatcctcttatgggccttagttcccctggccaagcccagcgctgatgtctcctttgccgagattcccccggctctgaccccactacaccaggatggtctgtttctggcctgactccccaccaggctgggacatgtcaaggacagggctcagggcttgaaaccatgcacagggatgctaagatgtagctccagtttcttgaatgactgcagccctatctcacccaaggttagacatggccgtcggctcccccttgcccaggggtcagtgccagttgctcggcctggcatctgcagcccagcctgaccccggatcttgccgcacctgccgccaccctgaagcctttgtttcctgactgatgcatgcgcaggctacacctcttaacatatgctgttccctttgcctggaatgcccttcctgcctcatcttctctctagcccaagctgggcacggtgtctcaggcctgtaatcccagcactttgggaggccgaggcgggtgaatcacttgaggtcaggagtttgagaccagcctggccaacatggtgaaaccctgtctctactaaaaatacaaaaattagccaggtatggtggtaggggcctgtaatcccagctactcaggaggctgagacatgagaatcacctgaaccctggggggaagaggttgcagtgagctgagatggcgccactgcatttgcctgggcaatagtctcaaaaaaagaaaaaagggccgggtgtggtggcttacgcctgtaatcctagcacttgggaaggctgaggtgggtggatcatgaggtcaggagtttaagaccagcctgaccaacatagtgaaaccctgtctctactaaaaatacaaaaattagctgggtgtggtggcacgcacctataatcccaactactcaggagactgaggcaggagaatcgcttgaacttgggaggcggagtttacagtgagccaagattgcgccactgcactctagcctgggcgacagagcaagacttgtctcaaaaaaaaaaaaaaaaaaaaaaaaaagatcctagccttcaggccctggagtgactgaggtaaggacagggctgagatggggcaggcatctaggtatgaagtagggctgggggcacctcacctccaccaggtcccagaagaacaccttcccgtcctcagaacagctgaccacatgtgtgtcacgctcgctcaggcagcagtccagcttgtattcctggttcttatggcccttgtacctaagggtggacaggatcggggggcttggtcctctccaggggtgggagaggagggaaggggatccccacgaccacaaggactcactcgcccagcagctcccctgtgtctttgtccaggagccgcaatgtggagtccaggctggacaccagggtgcactgcccatcccggctgaagcaggtgcaggtgatggggccttgggggaagggtgggtaggtgagtgagggtggggtgcccctggttggccccccatcttccctgcctgtcccacatccccagccacactcactgcccacgtagtctgagaagagctgccccatccttaggtcatagcgtctcacgcggccatccacggagctgcaggagagggtagatccagcgggaaccttgactacactcacatggctccaggcagccctgtgccttcccagcccagtgggcctgctcttccagtgcacaggagtggaattctgaagctctggccttgagactcaggcccagggccaattacgtcctactccatcatttccaagacccacaccccctttccaagcccttggagtccttctgattcccccttttcttccttttgtttgagacagagttttgctcttgttgctcaggctggagtgcaatggcatgatcttggctcaccggaacctctgcctcccgggttcaagagattctccttcctcagcctcccgagtagatgggaatacaggcatgcaccaccacgccctgctaattttgtatttttagtagagacggggtttctccatgttggtcaggctggtctcgaactcccaacctcaggtgatccgcccacctcagcctcccaaagtgctgggattacaggtgtgagccaccccacctggcccaattcccccttttcctgcattctccagctcctcctcctcagtactcagtcccaccactttccccactacccagcaccagcatctagactgttctggtctccctgcaccccccacagccaccagagggagcacttttcaaagtacagttgacccatgaacaacacggtttgaactgaacgcgtccacttatatgtggattttcttctgcctctatcagctgtgagacaccaagatcaatccctcctcttcctcctcctctgctttctcaacacgaagatctttatgacgatctcttcacttccacttaatgaatagaaaatatattttttccaccaggcgcggtggctcacgcctgtgattccagctctttgggaggccagggcaggtggatcacgaggtcaagagatggagaccctcctggccaacatggcgaaaccccgtctctactaaaaatacaaaaattagctgggcgtggtggcacgcgactgtagtcccagctactagggaggctgaggcaggagaatcgcctgaacctagaagttagaggttgcagtgagccgagatcacgtcactgcactccagcctggcaacagagcgagactgcgtctcaaaaaaaacaaaaattcttccttatgattatttttatgtatttatttatttaatttatttacttattttgagacggagtcttgctctatcgcccaggagtgtagtggtgcgatgtcggctcacagcaagctctgcctcctgggttcactccattctcctgcctcagcctcctgagtagctgggactacaggcgcctgccactatgcccggctaattttttgtatttttagtagagacggggtttcaccgtgttagccagaatgatctcgatctcctgacctcatgatccgcctgcctctgcctcccaaagtgctgggattacaggcatgagccacagcgcccggcctatttttatttatttttagaaatcattttatctttttttttttgagatggagtctcactttgtcgcccaggctggagtgcagtggcacaatctcggctcactgcaacctccaactcccgggttcaggcgattctcctgcctccgcctcccgagtggctgggattacaggctcccgtcaccacacctggctaatttttgcatttttagtagagacggggtttcaccatgttggccaggctgatctcaacctcctgacctcaagtgatctgcccaccttggcctcccaaagtgctgggattacaggtgtgagccaccgtgcccggccagattattattattttgtagacagtctgtctttcacccagcatggagtgcaatggtgcctcgaactcttggactcaagtgatccttccacttcagcctcccaagtagctgggattacagctgtgtgccactgtgcccagctgagagtaggttttaatctgagcatgggggcagctatgattccccgtagcacctggggtgagaccaggtcctggctccactcaccctgccaggatctcgtggtctgacaccttcacactggacacgccatctctggcctcatccagcgtctgcactggctcaggcctccgtgagcggcaatcccaacagcggatactggaatcaatagagcctgtgaggccagcatgatggtgaggtcaggtttggagggggagggcagcaccctgggcccccgtgcttaggccccagactcaccggacaggataactgtggcctcttcattaaactgcaccgtgttcaccttctgagaaagttattgccactcagaggaggctggactttggaggactgggataaaggcagggttcccagtgtcggttaaagcaagggcgaaggggaggtgaaaggttttgggggaacagcaaggacaggggttggtgactgcctagcctggcatgcggagtgggggatcgtcatctggggaagggatccttacggtgtaatgggggtggccgtgtcaccacctatgcgctaatacgggtcccctccactcaaatgagggtctccaggctttcactcacccctgcgtggccccggaatttgcgcacgacctgccctgatgccacatcccacagaaccaccgccttgtccccgccgccggagcagagactactgttgtcaaaggagctggagtaaaggaggaggaggatcagcatcgacctcggatcccagcctcagcgctcccatcccagcctggtccccggctcacccggccgcatccagcacctcgtagccgtggccgctgtacgtccgcagcagcgtcccccgaagcgggttccacagcttcagcgtcttgtcactgccgcacgtcaggcagtaattgccatccactggggaacaccaggcgggggttactgggccgtcgatctcaggaggcgggaggaggacccggaatgaagacgaaggcgctcaccattaaatcgtacggctcgcactgccccctgcccgcagtccagcgtcttcaaccgtttctgcggcagctctggaggccgcggctttggctcagggaaagccatgctcccaggactccttccttgcagccttaaatcggtctgtacggaaaattccgcgccttagaaacccacgcttgggtgtaaccttattattgttcttcctgacctacttcctgtttatcacttccgggttcatcattttggcatttcggtgatcgggttggaactattgaagcccgctttcaggttcttttccccattttccctttgaaaggaagacttctggcttctcctaaatctccgttctctgggtaaggggagtccaagcctct

SEQ ID NO: 96151 - DNA, 32726 bp, Homo sapiens
caacagggcatggggacatcatatcaggtaaggggaatgggtgtcctacagaggggttgccagcggggatgggtgctcagtggtcttctcccgatcaggctacatccacgtgacgcagaccttcagcattatggctgttctgtgggccctggtgtccgtgagcttcctggtcctgtcctgcttcccctcactgttccccccaggccacggcccgcttgtctcaaccaccgcagcctttgctgcaggtaaggactctggactggactggggcatcgcgagccagcgaattcctgccgaggagctgagccatctctcttgtccttgtccccagccatctccatggtggtggccatggcggtgtacrccagcgagcrgtgggaccagcctccacacccccagatccagaccttcttytcctggtccttctacctgggctgggtctcagctatcctcttgctctgtacaggtgactatcctgcccactgccctggggagctttgggagggtccagttggggtccctgaggacagagggcaggggcaagtgcttaaactctttctggctccccaggtgccctgagcctgggtgctcactgtggcggtccccgtcctggctatgaaaccttgtgagcagaaggcaagagcggcaagatgagttttgagcgttgtattccaaaggcctcatctggagcctcrggaaagtctggtcctacatctgcccgcccttccagcccttccccagcccctcctcttgtttcttcattcattcaacaaaatttggctggaatctggttattttgagattaattctgccaagacataagccaactgtctgccagctccatggtaggagctgggcaccaagggaaggtgagggcccaccaggccgaccagcctgcagggcgctcctgcccagtacgagtgcccggcccgtgtggacacaggctccaacccgtgtctatgtctccccttctccagcacttttcttcctccctgtgtctttctccctttagctggctctctttccttctctctccctctctgattttgtcccccttgccagaactcagcccttccttgcactcagtcagttctctttgcacatttccccatgctggggacactggcacgggtcagacccaggccctgcccagcaggggctcagtctgtggggtggtggggaggaggcacttacagaccagaagcagttaatacaggccagacagcagtcccagtgcagggagaatgccggaaaaagactgaccatattgtggagggatggagacgacttttctggagagagaacatttaggagcttcttaagggccagggaaaggtaatatccaggcagaggggcccaaagatgaacgtgcagaaaagtcaggagtcttgtggggatgaagatcggtaatttagggtcaggatatagaatgtggggggcgggggatggaaaatgaagagggagaggcaggtgggggctgtggcctctaatgtcatgctggactttctcttgaacatgatggggagttgggagaaaaattgtgggcaggggagggacagtgtcagctctgggtgccagaaagacccccctgtagacatggaggggaggccagaaggtgagggaggaacttggcaatgcaataggtgggacatgatgaggcctgacctgggaccaggaaaggagggaatgagccagacagattcaggggcaggaggagcaggacttagggacccaaggcttttcagggtgaagggcaagaagaaggtgaggacagtgcccaagggtctggctcgatgaactggatgggatggcagggccatccctaatatggtggaagacactaagctcagttggaatatggttgactattaaggccctgaggggcagccaggagcaggtgagaacttgagtcaggctcaggggagagaccttgggttggagatggagttttggatggagcattaaggagcactgaaactttggccgtgaggaggcttgcctggcaagagagtgcagggtggagcttcaagggatacccagatttacaagtgaaggggagaaggcagaggagcagaagtctgcagtcagacagctggggacctggagagcttctgcggtgcctagaatgtcaagggaagagaaggttgtttttttttttgagacggagtcttgttctatcacccaggctggagtgcagtggtgtgatcttggctcactgcaacctctgcctcccgggttcaagcaattctcctccctcagcctcttgagtagctgggattacaggcgtgcgccaccatacctggctaattttgtctttttttttttttttttgagatggagtcttgctctgtcgcccaggctagaatgcaatggcgcgatctcagctaactgcaacctccacctcccgggttcaagtgattctcctgcctcgcatccccagtagctgggattataggcacctgccatcacccccggctagcctggctaatttttgtatttttagtagagacggggttttgccatgttggtcaggcttgtctcaaacccctgacttcaggtgatctgcccgcctcggcctcctaaagtgctgggattacaggcgtgagccactgcgcacccggccaagggaaagagaagtttctaagaaagggctgggagtggtggctcacatccataatgtcagcattttgggaggccaaggtaggaggatcgcttgagcccaagagtttgagatcagattgggcaacatagcaagaccccatctctacaaaaaatcttaagaaaattagccaggtgtggtggcacatgcctgtagtcccagctactcaggaggccgaggcaggaggtttccttgagcccaggagttcaaggctgcagtgagctgtgatggtgccactgcactccagcctgggagagagagatggctcacgcctgtaatcccagcactttgggaggctgaggcaggcagatcacaaggtcaggagtccaagaccagcctggccaatatggtgaaaccccgtctctactaaaaatacaaaaattagccagatgtggtggtgtgcgcctgcagtcccagctacttgtgaggctgaggcagaagaattgcttgaacccaggaggtggaggttgcagtgagccgagatcgtgccactgcgctccagcctgggtgacagagcaagactccatctcaaaaaataataatgataataatgataaaagaaggactcggcctatcatgtaayggcccccaaagctgagatctgaatctaagcagtcactcagttgagagctgcgggggtgtatgcgatggtggtggggggagtgattatccctttaaacagccactgggggagggggttctggaacccctggcctcacagagacccagcctccctccccccgtctctctgggctctgtgtctaaggagccctagggcactgggtgtgagtcacttaggtgggcctgtgtggaggggtgtctggggaggacattgaacaggctgggctgaaagggcgttcggctgtcgggggaggtctctgggaagacaggttcctcacagcaaagcctgtggtgaaggtctcagaggcctctcaggggaagtctcaaggtctccagtaaggggaacgaggtctggagggaggaggttgtggatcctcaggcagggttgttgagggaggggggtctccaggtccccagaagcagggacctcaggcaggagtaccaggggaggagtgtggaggaagcgggctcctcagctgggggcctcggggtaggaaaggcctgggcccatcctgcccttgtggcccccggctgcagcctcagtggcatgggggtgaagcggagcctccagagtgggggcattctgctcagcctcgtggccaacgtcctcatggtgctctccacggccaccaactactggayccgccaacaagagggccacagtggcctgtggcaggaatgcaaccacggcatctgctccagcatcccctgccagagtgaggctccgcccgcccagatgtcagagggcatttcagacccccagggctcgggacacacagctgggcccatggcgagacgcccaccccttccaccccgggctcagttgcagctgtcccttgtcggccgaggccgccacgaaccccgcccctcgacttgtgggcttgtccccgaccccctccccgtcctggtagcggcagtaaccgcaggtcctgatgtgacctccaagtctcaatccaaacgcctgactcccggtcggtggagctcggctcctggccacacaccgggttgggggcaggagacgggagagcttccggttgcggccgaacccgtagtgactggggcggcgcccgcgggggctgatgcgcccgctctccccagccacgctggcggtgactgtggcgtgcatggtgctggcggtgggtgtcggcgtggtgggcatggtgatgggactgcggattcggtgcgacgagggcgagtcgctgcggggccagaccacgagcgccttcctcttcctcggcggtgagactgcagaccgccccaggcgggcaggcaggggcgggccctgggtgatggaggggcctggtcgccaggggaggggcttgaggtactcggccaggatccgagggrcagggctggaagaagccgagagaggtgggcggggctcgagacagagttcagagcgggaggagcaggaaggggcctgggccaggggcgggctgagaggcgataggcgtggtctgatagaagggggcgggtctgaaggggcgtggcctgggtgcagcccccaccaggcccagctagctcatcttgcggctgggcggggcccaggactgctgctgctgaccgccttgataggctacaccgtgaagaatgcgtggaagaacaacktcttcttctcttggtcctatttttctgggtggctggccttacccttctcaattctcgcgggtaamctggacagcgggaagagggtggaggagactgcccagaagaccctcaccccagaggctccccagctgccctcccaggaaaccccggggacctctcggggactccccaacacactaacgactcccgcagacccggcagagacccccttggagccccaaaccccagtccccggggccctcccggccatccgccccagggcccaccttcctctccctgctccgcacccccgtycccccaggcttctgctttctgctggcagacatgatcatgcagagcacygacgccatcagtggattccccgtgtgtctgtgactgcagcctgcctggggcagaataaaggaacggctttttttagcgctgcggctccgcgtgcttttctgcgggtcgtggggacgcaggcacggggttgcatagaggctcagggaagacataaggacatgaactcatagggaacgtggagacagggagacacagacatggagacacaagtctccatggattgggatgggaacagggacatgtgggaggggcggggccaggaggggacgtgggcctttggagagggtgtggagaggctgtggggacgacatggaggtgaagtagagacacggacaggggaggatacggatatggaagggacagggaacacggggatggagagagtggagagaccgacgcgcgaggattcagaggcgtgggaatacgagtaccgcgacttggagaggccgggaagaagtgggggatctggagagggagagcagatccggggataccgggaagtgtttataggaccgggaggatctataaactccgggcgcgcttccctccagtgcacgacctttcccctagttctctgccctgccctctccgccaggcctttccttctctctccaggtcccgctcgctccccgagatccgcttcccattggtttgcattgcttgccacacctcccttccttccggcctctcgattggtcctctgtcggggaggcgggctctgcagcggttgactggctgaccgtgctgcgcgcaggcgcagagaggggcgcggggggcgggggtggtggggcttctggactgagccgctgagggtgcgggctgaccctgtaagtggctgcggcgggaagatggcggagctgcgcgtgctcgtagctgtcaagagggtcatcgactacgccgtgaaggtgatcgggcccccctctcccacatccctgagtcccgcagccgtgtgcttccggggccacgagcgcacactgggtgggggtcttctcgtaacccccgacctctgccgctttaacccccaaacgtcaaagtcacctgagggcaaaaatccaagagtgaagttctaacatccgatccctycggggtcacggccatgttctcttttccctcgttctggattcactctcttgataactgttcagagtgagttgctttctctatttcttacccactggaagaagtcacggtccctgtttaatgcacggagaaactgaggcacagagmggtcacccagctagagaagggcagagccgagagttctatccaggttcctctgactgctttcacccactaggctgcattacttaccattgtactcttatattacccgaaatgtgctatagagggagtcagacagggtcctgtggggccccagaagctgctttccaccctccatagccacagggtgagccaggaggctctagctagggagagagaagtgtgtttgctagagatgaaagttcaaggagccaacctgactgagctgggggtagctcacattctccatgaaagaggtgggggagggtgctctctgagcgcctggcttgttgtccccagagggaagctggtgtggacagaggtgaatcagacacggtctctcaggcccgtttctctcaatgcttggcctgaactggactgaagatggtgactgtctgtccatgtctgtccttcccatcagcctggggacttacctccgtgtccacagcattacctagcgcagggcctggcaccctggaggcctcagggtgggcaaaaccagggtcacaaagttgacactgatactgcccctgcctgcttagggagtgggctggggaagagggtacaggagccagacttgagcatgaaagtgtcagtgatgatagcagccagcatttagcgggtacttacgtggcaggcatcgttccaagtcctttgcagagattaacccattcagtcctttcagtaccctttgtattatttattatttatttttattttttgagacggagttttgctctttttgcccaggctggagtgcaatggcgcagtcttggctcactgcaacctcmgcctcccgagttcaagcaattctcctacctcagcctcccaggtagctgggattacaggcatgtgccaccacacctggctaattttttgtatttttagtagagatggggtttcaccatgttggtcaggctggtctcaaactccagacctcaggtgatccaccygcctgcctcggccccccaaagtgctgggattacaggtgtgagccaccgtgcctggccgaccctttgtattattaattccattggatagatgaggaaactgaggccwgtcagatctcccagccagtaagtggcagagttacgatcgaaaccccgggcaagtctggctctagactctgctctcctatctccctcaatgccccctgtcctaatgatgcctctggcagcacatgacagggatgtcacctgtagcccttttgagacacattcctcttggggtcctgggacccaacacttggtttcctccctgctctgactgttcgttactgtcacatctttggagtcctacagctccctgggcctcttctctccatcccagccctggccttccccgcctggcatgtctgggattggatccgtctcccccatggtgcaggcccacgtttgactcagctctggtcccagcatcactcagcacagagcctggcacatggatgtctctggtgtgctcagggagagaacagaggggaagcgtgaaggccgcgttgaatcagctactgtcctttccagagggtgctgccttcccctcccgcagtgccccagggctccctgcattacatcctgtctcactggatgtgtctgttgatgtccttttcagaacaaataaatgattcagaccctgccagcttcctaaacaccagattagacctgggtactgtcccaccctctttcccttctcccaaagctgtcagttctccaccccccacccttcttgccctattgtctcttggtgtcattgtctcacctggaccctcaccygggtcctccctcactcccagtctctccctctcagcccacctctacccagccttaggggcgtttctgcacccagagctcaccctgctctcccctgctcccagcctgcctgtggctccccagcaccctcaggacagagtcgcagcccctctgcctggcatttgggatgctttgtggtccagcctcctcttcatggtctgcttcagccgtccacttccctccttggaccctcccwtaccctttgtgcttctgccactgtgacctgctcctcctgtcctgacagaccaggccgcggctcgcccgttccatgccttcttccagcaccaccctcctacctctgctttctgtcctttgtcctgyccatctccaactcatggattatatcaaaatctagtgattctctgccaggcgcggtggctcacacctctaatccctgtactttgtgaggccgaggcgagtggatcagttgaggtcaggagtttgagaccagccaggccaacatggtgaaaccccatctctcctaaaaataaaaaaattagccaggcatggtggcacgtatctgtagtcccagctactcgggaggctgaggcaggagaatcgcttgaacctgggaggcagaggttgcagtgagccaggattgtgtccctgtactccagcctgggtgacagagctagactcagtctcaaaataataataataataatttagtgattctccctggcatcgcctcctccaggaagcccctgaccctacaccctcaggttgccttggtatatccctgggggcttctgcagtccctagatttgcttccatcagccctcgccagactggattgggatcctctgtttaccccatgttccccactgccctactccatcatccccaggctggtagctccctgcagagaggggccatgtctgatccacctctgttcccagaatcacgtgctcactccctgacctctttcacctccttttcaaacatcaccttctctgggaggacttccctgcttgcctccttaaaatcacaggccccaggtccctgtgttttgctgtgttttcccctatacttagcaactagraagggagaggaaagtatgtttgctagagatgaaagttcaaggagccaacctaactgagtggagggagtgactcacattctccatgaargaggtgggagcaggggcaccctctgagagcccagcttgtccccagagggaagctggtgtggacactttgtaatccacagtgttgtttacttattgattgctctggtgtctgtcgccccttctggaatttgagctccaggtgtgggggagacagtttgatgtggtcactgcttcctgagacagtgggtgcactactagaatagtgcasacctcagactccamgccsagcgcctgcgtccacttcctgctgtgtgaccttgaggaaattgcttcaccactctaagcctcatttttctactctgtacartggggatgatggtactatctactttattgagttgtaatgaaaattaaataagcccttggaacagtgcctggcayacagtggtttgttttgttttattttttgagacggagtctatctctgttgcccaggctggagtgcagtggcaygatctcagctcactggaacctccacttcccaggttcaagcaactctgcctcagcctcctgagtagctgggattacacgtgtgagccaccacgcctggctaatttttgtatttttagtagaaacgaggttttgctatgttagccaggctggtctagacctcctgacctcaggtaatccacccgcctcagcctcccaacgtgctgggattacaggtgtgagccactgtgacyagctgcaataagtgtttttattgggagtagtagtaatggatgtttagttagtcatttattcaaaacataacaaatgctgtgctcagagtgtattcgtgtgtgtgtgtgtgtgtgtgtgtgtgtgtgtgtrtgtatgtgtgtccggctgtgtgtatgtttctgggtatgtgcgtgtatctaacattttaataggtatttggcaactcagtaacaccctgtcctgttcaggggcacattttacaggaagctgatgaagcttaaccttcagggcctctttyaagaccccaggagaaaggctgggcctggtggctcacgcctgtaaacacacactttgggaggctgaggtgggtggatcacgaggtcaggagttcaagaccatcctagccaacagagtgaaactctgtctctactaaaaatacaaaaattagctgggcrtggcggcgcgtgcccgtagtcccagctactyggggggctgaggcagaagaatcgcttgaaccagggaggcggaggttgcagtgaaccgagatcgtgccactgcactccagcctgggtgacagagggagactccgtctcacaaaaaaaaaaaaaaaaaaaaaaacccaggagaggctgggcaattttgtattcattatctgggattcattttcttagagatgaccccacaggatagaaactccaggcccagaaaacgtgtttccatctcggggcccaaccccgaccagccacaccctctcgtctgggagcgcctggtgtttcttcaggttttcctctttgggctccacgcacttgcccctcctgctctcagcaaggccaccttgtctgacagggcacacgtggggctcacatgtcacctcagggacgagttctctgtctgccccccgccgagttagtgatctgtcactggggtggctccctggccttggctgtcctgcttgctgagtgccctagcrcgtgcccagggactcgcttgacagaaaagcctagaggacagaaccacacaagtccttgagctgtgtcaggggttcaggaagagctgtcgaaaatcactttataaaatccctcttgggccgggcgtggtggctcacacctgtaattccagcattttgggaggccgaggtgggcggatcacctgaggtcaggagttcgagaccagcctggccaacatgacgaaaccccatctctactaaaaataaaaaaattagccaggcgtgggccgggcgcggtggcccacacgtgtaatctcagcactttgggaggctgaggcgggtggatcacaaggttaggagattgagaccatcctggctaacacggtgagaccttgtctctactaaaaatacaaaaaattagccaggcgtggtggcaggcgcctgtagtcccagctactggggaggctgaggcaggagaatcgcttgaacccagaaggtggagtttgcagtgagccaagatcatactactgcaccccagcctgggcaacagaacaagactctgtatcaaaaagaaagagaaagagagagagagagagagagagaaagagagaaagaaaagagaagagaagaaaatccctcttgcctgcagtggacaacaaataggaagactggctctcctaacaccgtgggcacacgtagcctctttcagagtctcacagttcccaagacagatttggggttagacccgtggtcctgccacttccatgctcagtgaccctggccaaggtacttggcctctctgtgcctcagttgcctcatctgtaaaatgagaggtaatggcagtaaccaacctcacaggctactaggatggtcaaacgagttaatgcatataaaacccttgactcgttgtctgcatgggtcagtgctgctttwaaaaaaattttttttttcttttctttttttttttttgagatagaatctggtctgtcacccaggctggagtgcattgatgtgatccctgctcactgcaacctccacctcccgggttcaagcgattctcctccctcagcctcccaactagctggaattacaggcatgtgctaaaacgctcgactaatttttgtatttttagtagagatggggttttaccatgttggccaggctggtctcgaactcctgaccacaagtgatccaccyacctcagccccacaaagtgctgggattacaggtgtgagccgccacgcccagctttgaggctgtttttgatattggtggatatgtcgtctctttaagagaaagccagcacttaatgctgaatgatttacctcaattataaaactttttttttttctttttgagacaaggtctagctctgtcacccaggctagagtggtacagtcacagctcgctgcagcctcgaccctcctgggttcaagccgtcctcccacctcagcctcctcagtagctgggactacaggtgcacgccaccatgacctgctaattttgttttttggtagagatgragtctctctatgttgcccaggctggtcttgaaatcctgggctccagtgatcctccttcctcagtctcctaaggtgctgggattacaggcatgagccatcattatttaaaaaacaaacaagctatcatttttcagccctaccattgtttcctgacttatgtaatataactaaactgtttttgaagcttaaaatyaactcaagcttaattgagaagatgagctagtttgtttcctcaggtgtgtgtgcgtgcgtgtgtgtgtgtgtgtctggaaagttcttaccctttctcctcaggagtcaggagcctgggaatcaggagcttagggctgggagttctgccagagcaagagcaagatgtggcttgaggcccttcagaagcctccctgactcacagcaagaagcttggggcctcttactgatgggtggatgaggttcttttctgtcttaaaggggcaactcctatgttgtgtttttttttttaagaaaaaaggccaggcactgcgactcacacctgtaatcccatcactttggtaggctgaagcaggcggatcactttaggccaggagttccagaccagcctgggaaacacggggaaatcctttctctacaaaaagtaaaaaaaaaaaaattagcccggcatgatggtgcccgcctgtggtcccagctactggggaggctgaagtgggaggatcacctgagcccgggaggtggaggttgcagtaaggcaaggtggcacctctgcactccagcctgggcaacgagagagatgaaaataacagttctttctctttcctctcctcttccagctccttctcctctttctcctttttctttttctttttcttttttgagatgaggtcttgctctgtcacccaggttacatgtagtggcatgatcacggctcactgcacccttgacctcctgggctcaggtgatcctcccgcctcagcctcctgagtagctgggactacaggtgtgtgccaccatacctggctgkkttttttttkttkttkttgttgttgtttgtttgtttgttttgaggcggagtcttgctctgtcgcccaggctggagtgccgtggcgcaatcttggctcattacaacctccacctcctgggttcaagcaattctccctgccccagcctctgagtagctgcaattacaggcgtgcactaccatgcccggctaattttttattttatttttatttttagtagagatggggttttgccatgttggccaggctggtcttgaactcttgacctcaggtgatccgcccaccttggcctcccaaagtgctgggattacaggcatgagccaccacgcccagctgtttttgtttttgttgttgttgtttgtagaacctgttgcccaggctagtatccaactcctgggcacaagtgatcctcccaccttggcctcccaaatttctgggattacagacaggagccactgcgcccggtctcagtcctccatcttttaatgttaccctctccatgaggcacagccagagtgggaagccccttatgggtcccaccttctcatctcggattctgtcctgcctgtgggaggaacagttacacccacagccccagagaaaaaggggcagggaaatagcaagagcatcccagtgtcctcaccaggctcagctgccacccgagatctgctctggccaagccctgggtggcggccacatgggagaagaggaagagggcaggctccaggccaaatggggcagctccctagcaaggcttctgtggatgtccctggaggctttttaaaaatttgtgccccaaaccaaactcgccgtcttcccggctctggctgatgtactgactggaagcccctttttggtgtcatcttcccatcacgaaccatggcctgtcagttgcacctccagaaacctcttgcatctgtctctgctgttacagctgtctgagccactgtcacctctcactttggtgacaaacagccacccagctctctccccacttcctctcatccttttccaattttctccaccaagaatccagaatgaccttataaaaactcaggttgggccrggagcggtggctcacgcctgtaatcccctgcctttgagaggccgaggtgggtggatcaccagagatcgggagttcgagaccagcctggccaacatagtgaaaccctgtctctattaaaaatacaaaaaattagctgggcgtggtggtgggcacctgtaatcacagctactcaggaggctgaggcaggagaatcgcttgaactggggaggcagaggttgcaatgagctgagatcatgccactgctctccatcctggacaacagagcaagactccatctcaaaaaaaaaaaaaaaaagaaagaaagaaaaaaaggattgtggtgggccaagaaataaaatagccctccaaaacagccaggtttcaatccctggcacctgagaaggggaaatcacttagaaacagggtctttgcaggctggccatgttggcttatgcctgtaatcccagcactttgggaggccgaggagagcagatcacctgaggtcaggagttcaagaccagcctggccaacatggtgaaaccctgtctctactaaaaatacaaaaattagccaggcgtggtgatgcatgcctgtaatcccagctacttgggaggctgaggcaggcaaattgcttgaacccgggaggcagaggttgcagtgagccgagatttcaccactgtactccagcctgggcgacagagcgagagcccatctaaaaaaaaaaaaaaaagaaattagaaacagggtctttgcagatgtgattaaattaagcatcttgagatgggggcattatcctggattatttaggtgggccctgaatgccatctcaagagtccttataagagagagacagagggagactagacacgcagagagaggagaaggccacgtgaagacagagctgaggatgctggcattgaagataaagcgatgcagccacaagccagggagtgtcagcagaagctggaggaggcaagaaacgtgttcctcccggggcctgcagaccccttggtctcaccctggtgacactgactttggacttctggcctccagagctgtaagattctaagccaccaaatatatggtgatttgttacggcagccgagagaaactaataggagagtggttagtggttcacgctacaccctggtctacaccggaagcctctctccctggcacatgatggtgtccccaggatccagctcagagccagrcacacagtggggcccaggagagacaaaaatgatgtgcagaagcaaatgggtggggtttgccacccacctcccttacctcccttgtctgtttagcaaagaggtctttcatgctggtgttttccaaattaggttgtgaccatgtgtgatcatgacatccaggcagagggctggcatttttccgaaaaagggtagaaaatgtcagagtatggtgtgtgtgtaggcagggtcagtattggtcactgacccttacactgcagtggcatttgtgaaataggtcagggtcactggtcacgttgtctaaggtgttatccgagctcgtttcacaaccaagagaattaaagagcatagaccacccaaaaggtgaggttggagcgaaagtttaataagcaaaagaagaaagctctccacagaggagagggaagcccaagcgggttgccatttttacagttgattccaaaagcttttttttttwwaaattatttatttatttattttttattattatactttaagttttaggatacatgtgcacaacgtacaggtttgttacatgtgtttacatgtgccatgttggtgtgctgcacccagtaactcgtcctttagcattaggtatatctcctaatgctatccctcccccctccccccaccccacgacagtccccggtgtgtgatgttccccttcctgtgtccatgtgttctcattgttcaattcccacctatgagtgagaacatgcrgtgtttggttttctgtccttgcgatagtttgctgagaatgatggtttccagcttcatccaygtccctacaaaggacatgaactcatcattgtttatggctgcatagtattccatggtgtatatgtgccacattttcttaatccagtctatcattgttggacatttgggttggttccaagtctttactattgtgaatagtgccgcaataaacatatgtgtgcatgtgtctttatagcagcatgatttataatcctttgggtatatacccagtaataggatggctgggtcaaatggtatttctagttctagatccctgaggaatcaccacaccgacttccacaatggttgaactagtttacagtcccaccaacagtgtaaaagtgttcctttttctccacatcctctccagcacctgttctttcctgactttttaatgatcgccgttctaactggtgtgagacggtatctcattgtgattttgatttgcatttctctgatggccagtgatgatgagcatttttcatgtgttttttggctgcataaatgtcttcttttgagaagtgtctattcatatccttcgcccactttttgatggggttgtttgtttttttcttgtacatttgtttgagttcattgtagattctggatattagccatttgtcagatgagtaggctgcaaaaattttctcccattctgtaggttgcctgttcactctgatggttaaactaaagagcttctgcacagcaaaagacaccaaaagcttttataagaaactcctttcatctctgtagctgtttgagtatcttatctgtaaagctatctgcataactctccgttatctatgtagttgtgggtacgtctttaggcaagcacaaagctccgcttctcttgtttctgtaaccgtgggtttgttttaggtaagctccgcccctccccgtgcaagttcccacagagaccaccatgtacgtgcctgaaaaggggagggaacttttcctgggagcctgtcagtcacgcaaagaacaaaaggcttctgtgctgggcagcttgagttttccccaggctgctctattgttgcctgtagctgtgatttttcaggcaggctgctcctctgaggaccacccttaactgtctacctaactggtttttccttttcttctcctcatttgtatttatgtatcagtgtattatgtatttatatacacttggagatacagtaaaatgtacctctcactgtgggttaccataaatactgtaaatttgagaaacactctttcaggcctgagaggagcagtgacaacagtagggatgatcaagtcagatgtccctggtacccaggaatggctggatgagagaaggagacagggtgacctgcccctgcctacaaactctaacccagttctgtccctrgagctgtgtgaccccggacaaggccctgcccctttccaggctgtcgttgtcctcatccagcctgggagagggttggcgctgaggcccccaccttcttgcctgtttcctcctgaccccaccccttcccctcctgctgggcagatccgagtgaagcctgacaggaccggtgtggtcacggatggtgtgaagcactccatgaaccccttctgtgagatcgcggtggaggaggctgtgcggctcaaggagaagaagctggtgaaggaggtcatcgccgtcagctgtgggcctgcacagtgccaggtgatgaaggtcttggggagggggctggactcctgggtctgacggaggaggggctgggacctggactcctgggtctgagggaggaggaggctggaagtctggacccctgggtctgagggaggatgggctgatagcctggattcctgggtctgaggaagaaggggatgggggccyggactcctgggtctgaggaaggaggggatgggggcctggactcctgggtctgaggaaggaggggatggggscctggactcytgggtctgaggraggaggggctgcgagccagactcctaggtccccctgaggatagcagccaagtcaagcccctctgtccttggcaggagacgattcgtaccgccctggccatgggtgcagaccgaggtatccacgtggaggtgcccccagcagaagcagaacgcttgggtcccctgcaggtggctcgggtcctggccaagctggcagagaaggagaaggtggacctggtgctgctgggcaaacaggtagctgtggtcagccctccctgtgcccccttgctcatccctgctcgggaggagggtggtggagatacggggtgagacagcagctggccaggcccagggcattcaccactccaggctgagcagcttgggactttgctgacccttctgacagagagtttgagcagggaggacagagtccctctgggtgttagaaagatcctcttgggccaggcacggtggtttacgcctgtaatctcagcactttgggaggccgaggccagtggatcacttgaggtcgagagtttgagattagcgtggccaacatggtgaaaccccatctcttctaaaaatataaaaattagccgggtgtggtatcacctgcctgtaatcccagctacttgggaggctgaggcatgagaatcactggaacctgggaggcggaggttgcagtgatacaagatcgcaccactgcactccaggcaccactgcactcctgcctgggagcagagcgagactctgtctcaaaaagaaaaaaagaagaaagatccttttgggtgagtttagaggctgggaggccgaggtgatggtcaygtgggggagaatgaggcctcagccaaaggtgacaggacagagcagagacatgatgtggcaggagagactgggcttagcatggggagggagggcagggaggaggcaaggacagtgcctgggtctgccttggtaacacaggtaggaaacccaggaagaacaggaggttagaggaggatcctacaaggggagtgtgaagagcccaggagacatcgatgcaggttcaggagacaggcctgggcttgaaacaaagacttgagaattttggagggcactggggagctatgggagttctatgagcagaagaggggtgggatcagcactaggtgcagaaagagcccccctgggctttgagaatggactggaatgggaaattggaggccaggagttagggaaggaggttagggctgggtgaggacccgaccagaaccttccctgccacactggtgctccccactgagataggggtacatggagctcatctgttcccccaggagaccctcgggcaccacctctgctcaggggtagctcatctcatttgagggcaaacctcatggcctcaaccagggaaggggcagaagagggacgtcagaagagccacaggcagatgggagtgagaagaggcagggaattagggatgaggctgagaaggaaggccaaagactgcaaggtatgtcaagcagagcacggagacagcagagcacagcaggctcaggtagagctggggcccccggagagagatggggatcccagggccaggtcagttctgggacaaagaggaggctgatgggtccaggtaggtcactgggtgtcctgcccagccctgagaaagtcagaagaaaacagagagagattatcaacagcaggggcatcagagtacagatcagtcaactgtggccgaagggcctacccggagaacaggccaaaaaggcagggcctgggtggggctgcagaggccgaggtgctggaagcatggcctttgcagccccctgcatttgctggtcgttctcagactccgatgtcctacctgtcctgggccagggacagttcctggggccagggcctccagctggggaaatgccggatgaactggtcaggatgctgtttgttctaggaagcagattcacaactcaaactggcttaagccagaaagcgaatttattatctcacgtaaatcaggggcttcaggcacagcttgatccagggtcacatatgagctgtaggctcccctctaccttgtcttcactgtctgyatctccaggctcagatcccaccagcccagtgaccccagcagaaagaaaggagcatctttcccaagggccccagcaaactcccagggctgactcttctttggtgcagcttgagtcatgtgcccctccctgaaccaatcactgggctggggctagaatgtccttgctggcccagaccctgttcatgcagctgcccaggggccacatagggtgggactcctgagaggctttatacagagggcagagacttgacgacagggatgccagrtggccccacatgtccctggacaagtggctgcttatctctgggcccaagtgaggggatcgttctagaccaaaagtcagtgaactatggcccagagcgacctctgatttgtaaataaagctttattggaacatcaccacatacattcatttacatattatttatggctgcctgtgtgctacaacagcagcgctgagtcaccgtgacagagaccgtatgacctgcagagcctgagatatttactacatctgttccaccatagaaaaggtttgccaacccgactggctgcggtgactcatgcctgtaatcccagagctttgggggatcatctgaggtcagcagttcaagaccagcctggccaacatgttgaaaccctgtctctactgaaaatacaaaaattagctgggcgtggtgttgggtgcctgtaatccyagctactcaggaggctgaggcaggagaattgcttgaacccaagaggcggaggttgcagtgagccaagattgtaccattgcactccagcctgggtgacagagcaagactccgtctsaaaaagaaaaaaaagaaagaaaaagtttgccaacccctgttctagacagaggcctgaatggtccatgagctccactgattgtcatacagtcttctgtctctccccattcaggccatcgatgatgactgtaaccagacagggcagatgacagctggatttcttgactggccacaggtgagactggagtggggagcacctgctgagggccaggccctcatccctcaaacttcatttctgcctcaaggcctttgcatttgctgttctctcctcctggaacactgttccctcrgattgcctcatggctttcttgttcccctccttgaggtctctgctgaggtatcacctcttcaaaggggmcttccttgccatcctacgtgaaatactcatgcccacccgctcaactcyaggttccccagtccccatctctgccagtccaatagaaatgcaggctggggccaggcatggtgactcatgcctgtaatcccagcactttgggaggccgaggcaggtggattacttgaggtcaggaggagtttgagaccagcctggtcaacatgttgaaacctcgtctccactaaaaatttaaaaattagctgggtgtggtggcgtgcgcctgtagtctcagctactcagggggctgagggaggagaattgcttgaacttgggaggcggaggttacagtgaggcaagatcgcaccccactgcactccagcctggcaacagagggaggctccgtctcaaaaaaagaaaaaagaaatgcaggcttggcacagtggctcacacctgtagtcctagcactttgggaggccacggtgggaggattacttgagcccaggagttcgagaccagccttggcaacatagttagaccccatctctaccaaaaaagaaaagttagctgggtgtgatggcacatgcctgtagtaccagcctcaggaggctgaggtgggaggatcccttgagttcaggaggtcaagactgcagtgagctgtgatcataccactgtactccagcctaggtgaaagagggaaaccctgtctcaaaaaaaaaaaaaaaaaaagaagcaaggcacatagacaaatttaaaatttttcacagctacataaaaaagtaaaaagaaacagacaaaattatattttatctcaccccattatatctaaaatattattttaacatgtaatcaacataaaaatattaagatacatatgctctacaagcaatggggttacgtcctgataaatccatcataaattgaaaatattataactgagagaatgcatttaatattcttaatctaccaaatatcatagctgagcccagcctaccttaaacatgtcacaacacttaacgttagcctacagtggggtaaaataatctaacataaagcacattttataataaagtgctaaatatcccatgtaatttatcaaatactgtactggaactaaaaaaacggaatggttgtacggacactggcagtatggtttctactgaatgtttatcactgtcacatcatcggaaaactgaaaaatcttaattcaaaccatcacaagtcagggaccatctgtattttacgttttttggattttctttgtactaaatcttcaaaattcagcatgtattttatatttacagcacatctcaattcaggtgctaaatttctatgagaaacacattcctaaagatgacagttgaaatagatttacacacccaagttgttcaaaacaaacttaaaagttttctagtaactgcatttccagtaactgcattgggtatctgtgtttttttgtttgtttgtttgtttttgtttttttttwaaacagcttcgttmtttacctacaataaaccgcacatatctaagttgcacaatttgttaagtttgcttttcttaaactcttttatttagatagagatgggggtctcactatgttgcccaagctggtctttaactcctgggctcaagcaagctgctcacctcagccctccaaaatttaagttttgatatgtgttacatccatgaaatcatcaccacaatcatgataatgtgtcttgaattctcagtatttatttatttttatttttttgaggtggagtcttgttctgtccccaggctggagtgcagtggcgcgatcttggctcactgcagcctccgcctcccgaatttaagcgattctcctgcctcagcctcccgagtagatcggattacaagcgtgcatcaccatacctggataatttttgtatttttagtagagacagggtttcaccatgttggccaggctggtcttgaactcctgacctcaagtgatccacccgccttggcccctcaaagtgctgggattacaggcatgarccactgcgcctggccaaattatcagtatttaaatttaaataaaatgtaaaaattcattcctcagctgcactggctggacagccacacgcagccagtggctactggatgggacaacacattcaaaaccattatcctgttttatcttcaaagcatttaccactgtctgactagcttctccaacgtgcgcccttcttgctctcatatcatgtgtcttattttcttcttattccttctgattggaaatgatctcatttgtgtgtgtgtgtttttccctggtgactggttgtcttccctggcagaatatgagcccacccaagctggtgcttcactggtcgtgttcacagtgtgtctccaggggcaggttcataagggcactaggaggaggttgtgaatgaagggaggtgatgttcacactaagacctgaaaaatgtgtccagttaataagtggacagggacaaaggtcgttagacaaagaggagtgtaggtggcatcagttaccaggggaggaaatgttgattcaggactgagaggcaaagggacctggctagaggacggggtcccagaaggtggtttaaggactggtgtggacacacacagttctgttgtctgcccagcggaggggcctcacggggggcygttgggagccagattgtcagcttttggatttaccagctgtgggtggcagtgggcgtgtaactcagcatcttgctgcctcagtttctctcatctgtaaagtggggataataacatttacctcataaagttcctgygaggattcgatgacttgatacatcagttgcttagcrcagggctcagcactcagtacatgttccctgtcaggaaggcagggaggcctcactggcagcatcaggacatgggacatcaggacatacaccgtggctctcagggaaaggaaaragaccctctcccaggtgtacaagctcgattctaaacstcatgggaccctgcattgttygctccctcattcattcactagtccrtgcgtgtactcagtagtggcataagcagactgctcgggtcggacctgaattagcctcacccactctcctcctacactgtccctccccagggcacattcgcctcccaggtgaygctggagggggacaagttgaaagtggagcrggagatcgatgggggcctggagaccctgcgcctgaagctgccagctgtggtgacagctgacctgaggctcaacgagccccgctacgccacgctgcccaacatcatggtgagcccctggccagcgggcactgagggcctrggggtggcaagcacattgccagcccagtgccccccggtggtcgcacgtggggagggaaggatccaaaggaggtctcgtgcacaggaagccgtcacctggagtttggctgatagagagagtttgctgggtcatctctgccaatactgagagttcatgggggctgctttggctagcagggagggcttgctggtatgtaggccagtagaaagccttcgctgggcagcagaaggtgttccctttgtcattccagccagtggaacaagttcactgggtcatctaggttcattagggagggtccccttggtaatttttgccaatgtgaagttaccatgtagatcatcttagttaactaggaagggtgcatggggtctcttggctaacaggtagagttcactaatcatcatggccagtaggatgggttcgctgggtcatcttggccaatattaacagtttagtgggtcatctccgccaatagagaatattcatctcagccaacagggagggttcactggatcatctcaactaatggggagggttcaatgagtcatttcagccattacagagtgttcactacatcatctcagcctatagggagggttcagcgcatcatctcagcctataggcagggttcagcgcatcatctcagcctatagggagggttcagcgcatcatctcagcctatagggagggttcagcgcatcatctcagtctatagggagggttcagcgcatcatctcagcctatagggagggttcagcgcatcatctcagcctatagggagggttctgcgcatcatctcagtctatagggagggttcagcgcatcatctcagcctataggggagggttcagcgcatcatctcagcctatagggagggttcagggcatcatctcagcctatagggagggttcagcgcatcatctcagcctatagggagggttcagcgcatcatctcagcctatagggagggttcagcgcatcatctcagcctatagggagggttcagcgcatcatctcagcctatagggagggttcagcgcatcatctcagcctatagggagggttcagcgcatcatctcagcctatagggagggttcagcgcatcatctcagtctatagggagggttcagtgcatcatctcagcctattgggarccttcagcatgccatctcaaccaaaagtccactgagtcattactaccaaaaggatgggtttgccactctgttgcagccagtgaagggcttcctgatttggttacctaaaggaggactgctgcagtagttgggccycccagggccycctagccagcaggagttgtccacaccaggtgtggccctgtgagaagtttcgcgtgtcctggccagtgggtgggtccagagggttcagcccatgggactggtctgcaggcctggcacccatgggaaggaggtggcaggaagggtggcaggagttccacagccctgtgaacaatggcttcccatgtgcagaaagccaagaagaagaagatcgaggtgatcaagcctggggacctgggtgtggacctgacctccaagctctctgtgatcagtgtggaggacccgccccagcgcacggccggcgtcaaggtggagaccactgaggacctggtggccaagctgaaggagattgggcggatttgagcccctcccagagatggcaataaaactgactctcaacatctatctctgttaacttatttcctagagacccattatttggttcattcaacatttacttgagtcttttgtgtgccaggccctgtggatccagtccctgcccatgaggagcctctgtattgatgcgggggacaatgaggacaaaggcagctgtaattcggggtgaagtatgctagacgtggaggcacactgggcccttgggaacccaactgggggacctggcctggcccagccggtggggtcagagatttcccagggagatgacttccaagttgagtgttggaacacaaatatcagtgaggtgggtgagaagaagggcttttatccacgatgtttgcaggacactcattctctcttgtgtccccagtctcagcagggacacaggagagaatgaggccagaagctgtggttctggtgtgagacagacaagccacagagaatcaaaacttagcgttgcaatgaacagcctgggtctacagtcaggttaatttttttttaattatgttttttgagacagagtctcgctctgttgcccaggcttgcaccaccacacccggctaatttttgtacttttagtagagacggggtttcaccatgttgcccaggctgtcttgaactcctgacctcaagtgatccgcccgcctcagcctctcaaagtgctgggattacaagcgtgagccacagcgcctggactaattttttatttaaaaaattgtgttccattcctctggccttctgatagagtcagatatattgatttcatatgctcactcttacctttgccagctagatcttgggtgagttccttcctattttgagtttcagttgcctcatctgcagatgaaaatagtaacagcatcatgtagaggttaagggtatgggttctgggtcccagggccctgggtcaaatcccactggatccattcctggatccagttcaggatcagttcatgtgcctcaaatggggccaggggattgacttccaagagggctcacccacatagccagcaagctggctggggctgctgaccaggggccatgattcccctccatggggctgctgatcctcgcagtgtggcggctggattccatgagggagtgtcctatgatacagaaagtggcatatgccggcctagatgcagatcctggcacagggccacttccacgtcttggtccagcagtcacacagcctactcagatccaagcagaggggacatagaccccgcatcttaacaggaggacgctcaaatttgcagccctctttaagctacatcatctactccatggagttttgaaaggttaatttatgtagcacccccataaccacacctgctatgcaaaaaatgctaaatatatattattaccaatattagtccgggcacggtggctcacgcctgtaatcccaacactgggaggctgaggcgggcagatcacttgaggtcaggagttcatgataagcctggccaacatggcaaaaccccatctctcctaaaaataacaaaaattagcctggtgtggtgatgcacacctatactcccagctgctgcagaggctgagacgggagaatcacttgaacccgggagatggagcctgcagtgagctgaggcactcactgggtgacagaacgagactccatctcaaaatatatatatattaccagtattattactggtgagaactgggccagggtaagcttagaggactgggagctgagcagaggccctaagctccacatgggatggtgggaaaagctatcagaaggagtcaatggtctgaccatcctggtcccaagtccagcttctccctctggctgtgcaacctcctgcaggtcccttgacctctctgagcctaagtcccctggcctgcaaagtgagtataatgacactcagcttatagggtgtttagaagtgttcagcctgatagtgcataggaaacatttagcgtagttcctggctcaaattaagtggtaattatggttcttaataaggtgagacctgaaggacaagttgtggtttagccaggttggagggaggtggagagtgggagagagcattccaggtagaggactgggaggtgagatgggcgggcaggataagaatggcaggatgttcaagtgcttgagtgggggctgtgcatgagtttgctttgaaccttggatgtctccagagggcactggggagccaggggagggctgtgagcagggggaggcaggttcagctctgggtatagaaggaccctggcagggaatggaggagactgggcagaggagggagacggggcaggaagagaagacagagcctggccagtgagaactagggggaggagggttggactcagatcgacagtggtgacagggagggaggaggtgggaatgttctccagcatttgcgaagacagtgaagccatcctggaggtgtgaggaagtttgggttagaggaaagagtctgagtttagcgggacacaggccaygtgagggcctcggggatgcggaaatgcagctctagtctcaggatagaggccctggcaggagatagcacctggagacttggttctgagggcaacagagagccgtgggagggtttggagcagaggaggagcagggtcagatgtatctgaggctgcaggcaagacagagtggaaggagccaggaggctggggaggaggaagcctgctctgaagctgtggccatcagaggtggggctctcggaaaggtcacctcaccctcctccaggaagtcttcctggctttgtctcacaaatttgctcccacatttttagctgggaatgttttctccagcttccccctgggggtggggagggcagggatcaggctgggcctctctgcagatgggaccagctaatgaagagagtgggrtgaggtgggcagctcagccaccacactggggttgaggatcttggcacctccctctgggtctggctcccttcccctcccaggaagctaagctaccagtcctgttggactcgtctgacccgggagggatgggtgcagtcctgggtctctctccagtgtcctttcagtgaggccagcaccatggacamcccacaggctctgccactcttcctactcctgggtaagttccctgctcagtcccttccctgtcagtctccctcagcagcctcccccaatgccttcctctcttctctgcagcctccttggtagggatcctcaccctcagagcctcttctggacttcagcaaaccaacttctcctctgccttctcttcagactcaaagagctcttcccaggggctgggtgtggaagttccctccatcaaacctcccagctggaaagttccagatcagttcctggattcaaaagcctctgctggaatctctgattccagctggtttcctgaggccctgagttccaacatgtctgggtccttctggtcaaatgtttctgctgagggccaagatttgagcccggtttcmcccttctctgaaacccctggttctgaagtatttcctgatatttcggatcctcaagttcctgccaaagaccccaagccttccttcactgttaagaccccagcttcaaacatttctactcaagtctcccataccaaactgtctgttgaggccccagattcaaaattctccccggatgatatggatcttaaactctctgcccagagccctgaatccaaattttctgcagagacccactcagctgcaagctttccccagcaggtggggggcccactcgctgtgctggtggggaccaccatccggctccccctagtcccaatccccaaccctgggccccccacctctctggtggtctggcgccggggctcaaaggtgctggcagctgggggcctggggccaggggcwcctctgatcagcctggaccctgctcaccgagaccacctgcgatttgaccaggcccggggggttctggagctcgcctctgcccagctggacgatgcaggggtctacacggctgaggtcatccgggcaggggtctcccagcagactcacgagttcacggtgggtgtgtatggtaagtgggccctggcgtccggcgtgcaggcggcaggggctgctctgctctgccaggctttgggcaagtcacggtgctgtggggtccctggataggagaagaggacttctgggttgaggaagggagaaaaagagctagaggtcaaggcaggggtgtctgagcaaaggtggacctgggatggagactcctgggagcctgaactcccaggtctgagggaggaggaggaggctaggagcctcttctggcgaactcctgggtcccggagaggaggtgtctgggggctcaaactcataggtttatgagaggagagggatgggggctgagactccaggggcttagagggagcagcggctggggttccctctaaggggaccaaagatgggctccaggactgggtgggtcctgagcccattctccctctcccagagcccctaccccagctgtcggttcagcccaaggctccagagacagaggagggggcggccgagctccggctgcgctgcctggggtgggggccaggtcgcggggagctgagctggagccgggacggacgcgccctggaggcggcggaatcggagggagccgagacgccccggatrcgctcagagggcgaccagctgctcatcgtgcgccctgtgcgcagcgaccacgcccggtacacttgccgcgtccgcagccccttcggccacagggaggctgccgccgacgtcagcgtcttctgtgagtgggggatgcctcgggtcggggacagggggtccttggggagaagcgggctggggacccagtctccgggagtcctagcggcgtcccaggtgaccctgacactcgcggtcccgacccctcctccctccagacggcccggacccgccgaccatcacggtctcctcggaccgcgacgccgcgcctgcccgctttgtcaccgcgggcagtaacgtgaccttgcgctgcgccgccgcctcgcggccgcccgccgacatcacgtggagcctggcggacccggccgaggccgcggtgcccgcggggtcgcgcctcctgctgcccgcggtcggaccgggccacgcaggcacctacgcctgcctggcggcgaacccgcgtaccggccgccgccgccgctcgctgctcaaccttacagtggcgggtgagaggctggagcgggagtaggggaatgcctgggagaggggcggggccagaacgagggcggggctagaggaaaggggcggggccagcaaggaggagcagcataccggtgggtggggcagggccagcgggagggcgggtcaccaagaaggagctgggatacccgtggtggggcgggccagcgcggaggggcggagacacctaggataagaggcggggccagaaagaggataagggaaggagccaaatagagtggcagggatgaccaggactgacgggccggcccagcactgagagggcggacattcctgggcatggaacactcgacaaagtcgacaagcggagttaaatggcaaagagtgggagttagaaaaggaaagaactaatttgcttaagtgggatcagcaaagggagaagttacctggcaaggggggcggagtcaccagggaaaggggcgaggtcatttagaaagcgggcagaattgtcttagaaaggggaaggggtccacaaggaagggcggagatatctgggaaaaggggaggcttctcggagtgcaatccaggagggggcgaagtaacctggcagaagtgggtggagctggaaaggaaggggctgagttacgtttgggaagagaaatatcattgtgtgaagatgcagttttcttaagaaagttgggcagtcagcagggctgcgggctacccacttagcgaggaagttaatgggaaaagggaacgggatcgcaggaaaagtggggagtgtgagcgcctatggggtggggctagtgaagaagggtggagtcaccgcgcggggaggcggggctggagaagaaatgagaaagggactccatcttcattctctc

SEQ ID NO: 96152 - DNA, 22877 bp, Homo sapiens
gtggatgtacagtcatcattgctggctaggctccctccctccctccctggatttcggcagaatcatggaagcctaggggtttcccagaataggcatgtgggggagaaaaggtcccgtctaactccagcccatccaaggttctgagttcctggaagtccagaggcagtctctttacagacttggggtctttgctgatcctggagtctttttcctctaaggtcccacctccccggagctcctcaacccatcctcccaggactggccactctgagtggtgtccatagaactattacgcaggagtcggttgggggtcccagctgctaggccctctctccccaacttctctcctccccctcttgcctatccttccctctctctctccctcctccattctcctcctcctcttctgatcttcctccccctccttctctctttccctccctcctcctctccttcctccttcttcccttatctttccttcccctccttccttcctctccatttttttttcccccagacagagtcgctttgtcgcctaggctggagtgcagtggcgtgatctcggctcattgcaaactccacctcccgggttcaagcgattctcctgcctcagcctcctgagtagctgggactacaggcatgcaccaccacgcccacctaatttttgtgtttttagtagagacggggtttcaccatgtcagctaggctagtcttgaactcctgacctcaagtgctccacctgccttggcctcccaaagtgctgggattacaggcgtgagccaccgtgcccggtcgctctcctttttctttcccctctccatctaccaatctgactttctatcctgacctcacacattgttcaacacatatttgttgagcacctacctagacacaggtccaggctctgaggaatgagccatgaacaaaccagataaagacagctgcctgtctagagcttgcattcgaaccaggaagacacacattacacaaaaaagatactaaacgtaccttatgcaggttatacgttatataggaaggggaccaatgctatggggaaaaagaaaaagcagaagagagtaagggggtcaggaatccaggggtagggcagtttttcgctgttgaatagatggtcgtggaagccagcttctgtctttcattcctctccctccctccttttctcctctgtctctcggtatctagatccccgcagtgtgcatttcccttcccaatccaggacacctggcaaagaaaccatctaccgggattcaagcatttaataaaacaaggatctcttcaggttactgcccaggggccccttgccctcactggttccccagtaggtacctgcctgagatggagcaaagcgaggagcaactgtagccagaactagctgaggttaggggcttggcaagttagcccgccatgtctgtgtccatcccccagtcttcttggtcctggctcctcggggtcctgcacctctgcccaacctcactcacacttcctctctagcctggaaaagccccagggatctctgatgcaaccccaccccccagcaactcatcctggcccagagccccctgtctctccctccagtttgtcccttactcagacaaagagctgatcctgcccctcccttgctcacagcccttccatggctccccattgccaccagagcaaagtcctagcctctgattcctgcattcaaaacccgacacgttgcatgtgttaaatagcttgatttagccatttcacaacgaatatatatatatgtatatagcaaatgtcacgttgtataccataaatatgtataattgttacttagtttaaaaaaaaattttttttgagacgggaggctggagtgcagtggcgcaatcttcgttcactgcaacctccgcctcccattcaagtgactctcccacctcagtctcctgagtagctgggattacaggtgcacgccaccacacccggctaacttttgtatttttagtatagacggggtttcaccattttggacaggctggtctcaaactcctgacctcaagtgatctgcccgccttggcctcccaaagtgctgggattacaggcataagccactgtgcctggccaaaaaaaatttttttaaacctaaatgagcggacctcactagggaccctacaatcccccagccccttgtttcaccctttgtgcttcacagcatcaatccgcccttacttttttgactggccacaccatttcttgccttggatgcccctttcttgccccaccgtccaccaccaccctgaccacggctaacgcctcatcagccagcatcacctcctccaggaagccctccctgactcttgggctgggttggtgcatccttgtactgttttgtggccctctgtttacacagctgtcttctccaccagattggcatctccccaagggcagggcccagggctgagtcatctctgtgtgcccggcatcgcccagcccagccctgtccaccagggctcaggagatgtccccacaatgaatgaatgttctctcctctgcctttgctccatttttgccttacctctcccaccctgtgctccttctgtccaggtattctgtaagctgtaccctgaggtttcctgatgatggctgaaatgctgggaaggccactgtggacccagggcaggaactggagagcagccaccasaggaatgggggtttctaggagccatgggtgttagcgaggggtgcggtgtccctacctgtccctccaacaccagccccggcctgctgtgggagtgttcagcttcactgctccctgtctttcagcacttgtctgggctgcttccagccttggtcatctcttcctgcaagaaattctgggggctggacatgtaggtctaagggagaaggaagctgggagttgagactcctgggtctgagggaggaggggatgggggcctgggcctgggctccagggtctgagggaggaggggatgggggcctggactcctgggtctgagggaggaggrgatggrgbctggactcctgggtctgagggaggaggrgatggrgyctggactcctgggtctgagggaggaggggatggggcctggactcctgggtctgagggaggaggggatggggcctggactcctgggtctgagggaggcggggctggcagcctggactcctgggtctgagggaggggtgctggggacctggacttctgggtctgagggaggtggggctgggggcctggactcctgggtctcagggaggagggactgggggtctggaccctgggtctgagggatgaggaactctgaacctgtactcctgggtctgaaggaggaggggctgggtgtctgggatcctgggtctgagggaggagggacatgggaacctggactcctgggcctgagagaggaagggctggggtctggactctcgggtctgaaggaggagggtgctgggaacctggactcctgggtcttagaggagggaactgttgaggattaaagccctggttatccttcctcaaccgcactctggttttagaaacatctggttttatacagctgctccacccgagcagggcggggtgggggctgrgcagccaaatgccccacttctggggaggagcctgcgctgccccctcccactgggcggaggactcaccctccccttctgctctgggctggcctcagatcatctgaggacccatcatcctgacacagccagacaccaggcrgcccggctcccggcaacagcgtcagacacagcccggcccgccctggtgggtgggaagggcgttcgagctccttgggaatgcaccttctccctgacaggcccaggcagaggcttggcctggcgcagcctcctcggggaaaaccccagggtgtgaggacttggtgtgaggacttggtgtctggcaggggagagctccgggacaggctggaagagatggaactgcagggagagacgaagatgtagaaacagagaaatggagagaaactgaatgagagagacagagacagagaaacacatacagagatagagccttacaaagagataggtgcggtggctcacgcctgtaatcccaacactttggaaggccaaggcagatggatcacttgargtcaggagttggagaccagcctggcctacatagtgaaaccccatctctactaaaaatacaaaaaattagccaggtgtggtggtgggcgcttgtagttccagctactcgggaggctaaggcaggagaatcgcttgaacccgggaggcggaggttgcagtgagccgagctcacgccactgcactccagcctaggtgagagagtgagactccgtctcaaaaaaaaaaaaaaaaaaagagagagatggggatgcagagagacggaaggaggatagagacagagctagagagggagggagatagagggaaaaagagacagagagaaagagacacacacacatggacacacagtgagaaagtcagggagaggcactcagaaagaaagagagccacacaagaagaaagtcagggagacttcagaaatgcaaagggacagacactcccaggtaaaagcagagagagaatggctgtgaggggggatgaggaggagaaacagacaggaatacacagaggcagagacccaaatagagggaccgagaaacagagatggggtgacagatacaaaatgacagagatttggggagggacagacgaggagagagaagcacgggggaatttctctctgctgctccatgtctttcagcctgtcctggagctggccsgtgccagacaccaaaggtcgttggagtcacaggcagggagaaaagaacgaggcagctaccgaggcagctaccaaggccgaaagtgagacatcaatagttcacagtaagaggagcagagagaagaacagaattagatacagatagtttttttaaaaaattcatggaaagaagggcatgtaaacagacatttatcacagatctggtcctgaggggctggggttcgggcaccccaggtcccgcatctcttttcacccttcctctgactcagtttccctgatgggtgacagcactgacagaccccggctggctccccagggtcagctgaccgacaactctctgtgttcatccctgagtccctggggatacaaatcccagcgccccagctctccaccccagaccctggtgcacacacgcagacccacgtcagttaggcgctgaatggacagatgttcactcacagctccggttccaggcagccgtgcctcgggccagcgtacacacaggcacacccacagcacgcacgtgtgtgagtttcgttccatctgccagttgctgagacatgtccctggggggcccaacccagagatggattctggggacaggagaggcggctgtggggagaagcagggcgggggtgactggggaaggtgagaagggggaggtggggagagctttaaagcaagaagagaaagaaatgagggtgagaggaggcaagagaagtggagaggaagaaagggatggagagaaagacagaaacttggagaaatgtggtaatggggagagagatgagggtaccaacaaagagatgaggagaaatagtgggttagggagaaagaaagggatggagggaaatacagggataggggatggggggatgaggggaacccccaaaatgcaagtgaggtggaagagaaaaatcaggggagacaagggacgagaggggggaggaagagagaagaagacatagaggagggagggagaggagggggagtgatggcagagaggactagaggaggggcgcgggtagacatgggggcctgggaagggaggcccgtctggctgaggggggtgggagtaatagcgggaagcgggtggagctgcccggctgggccgtgacctcagagcccctggcccagcttagcctgactgacgtcagcgctcgctcccgcccccgcctgcgctggtcttcaaatgacccccctccagctctctggccacagagaggctgggagagcaagccggagagaagagagagcccggccagacccactgcgatgagacaggtgtgtgtgtgtgtgtgtgtgtgtgtgtgtgtgtgtgtgkgtgtatacagccatgtggggaaaactactgccatatgtgtgaccacgtgtgttggggaactgtgtgtgcatgatttcatgtgtgtatccatgtgcctgacagtgaccatatgtgtgtaggggacagtgagcatgtgaggctgagtgtgcaggtctgtgtatacattgccctgtgtgagcggccatcccaagtacatgtaggtgagacgtgccatgtccgtatttctgtatctgcgtatcttgctacaaacttgtgtatgtctatgttccctgggaggcagagagaaagagggagtgcgacagtgagcgaatgaaagagactgagtgagaaagagagttggatttgcctgtggcacatgggaatggatttctgtttcatgcgttcaatagctattaagttgaaccaaatgaaatcgccgatactgagccactctaaacttggaagaatagcaatttcatctggttcagtatcagcttgacagtcacctactatttctcttgaaatcttccctgtgcgtcccattgccccagactctcagttggggctctgtgtgtttgtggccacgtggacatcctttgctggtgttgctttttcctgctgaggggtgtgtgtctgcaggttcacctgtgtggccgtcggtgggggtcacgggatcgctgtgtttggcctgagtgggtgtctcgggtcatcctgtagaacacgagtaatttcattctgtgtgtcactcatcatgtgtgagttcacgtgtgggggagtgtgtctacacgtgtgttcatctgtgtttctggaatcaactctctggatccccagcatgaattgagccatccctaggaactcaggcaaggccaggtttgaagcaaaggaagagagaagggggattcgagaagaaagaataatgtttaatgttgagagtttaaaagctgtacctcagttttgtcctctagaaatgtaacgaaaaccacaatatctaatttaaaattttcttgtggccacatttgaaaaagtaaaaacaaacaggtgaaattaattttaataatatatttttatttaacccagtgtgtcaggggccagcacatttttttaaataaagggcccaatattaaatatttgaggcttttgggggccatctggtctcttttgaaagtactcaacttcgatgtggtaaatgtagaatcagccacagatgatgtataaacaaatgaatgtggttgtatgcaaataaaacttcctttaaggacactgaaatttgaatttcatatttttcatgctccacaaactattattcttcttttggctttcaaaaaccatctaaaaacacacacacaaattcttagcctgcaggctgcagcaggtcttagcatgccgacccctgctrcatataagatatgatcatttcaatatgtaatcaatacataaatgttaatgagctattttactttcttttccccagacttggccttcaaaatccagtgtgttcatagcacttctcacttagatgctaccttttcactggaaatacctaatctgtgtttagattttataagatttacaattataaaaggggcatcgtagatgcaacttgttccagacatatttaaaatctttccaataaccgaatcaagtaagagtttttaaatttaaatgaattaaaattaaataaaatttaaaactcagttcctcggtgatactggctgcatttcaagtactcggtagacacatgtggctgctgacacctgtgttggacacaaagatctacatcttaacgacgcatttaaataacccacagtaagccttgaggcaggaactggtggcataggaggcagtttagcgtagaggggacgccagagccagactgcctgagttttacttctgactctgcttattacctgagtgaccttgggtaaaagtatttgcctctcagtgtctcagtttcctcatctgtaacagaagacagtgaaggtacctgccttataagattgttgtagagaccgggtgcagtagctcacgcctataatcccagcactttagggggccaaggcaggaggatcgctagagcctgggagttcgagaccaacttgagaaacacagcaagaccctgtctctattattattattattatttcgagatggagtctcgcactgtcacccaggctgaagtgtagtggtgccatcttggctcactgcaacctccacctcaggggttcaagcagttctcctgccttagccttctgaggagctgagactacagtcgtgcgccaccaagcctggctaatttttgtattttgctttcgccatgttagccaggctaatctcgaactcctgacctcaggtgatccacccgcctccgcctcccaaagtgctgggattacaggcgtgagccacagtttctggctccctgtctcaatttaaaaaaaaatttatatatatatattaaggttgttgtacagtagtgtctggcacacagaaagtactttttcctctgattctgggctcttccagcaacatttactggggcacctggctctgctggggagttgggcagtggaaaaggagaaccaggctatgcctctggaaagtcagagagaagagtcctctaccatgggctgctgatcttgtgcaagccactccttctggccaatcagtcctcagtttggccacctgtatggtggcagagcactatctgtcccccagggctctcccgagggctagaggtttagagattcagttcctagggttcaaatccaggttcctctgctttccagggacraccttgggcaaattgctgaacctctgtgtgactcagttgcctcatctgtacaacggggataataataacagtacctaccttacagcgctgttgtaaagattaaaataaattcattcatcttaaaggcttagagcagggactggtacacagcattttggttttttagtatgtgttattattattactgtctcaaccctaagaaamctttgattgggagataaatcctcattgtatgtgccactaagaaagaggagggaaacgccctagtaattaaattgtgacactccatcgcatgcaatcatcctcacggatttaagagatttcaaaacgtggaaaaaagttgtattggaagaaacaaaatcaggctgggcttggtggctcatgcctgtattcatagcactttgggagactggrgcctaggagacatagtgagacccctcctctaattktttttttttttaattagcaaggcatagtgactccagccttgtggtcctagcttcttgggagactgaggtgagagaatcgccagagcctaggagttagaagctgcagtgagctatgatggtgccactgcaccccagcctgggcgacagagcaagaccctgtctataaaaataaataataatgaaaagaaggaatctaatcagcatgaagcctagatagctatttgctccaattattttcgttaatgaaaataattttggggcccggcgaggtagctcatgcctgtaatcccagcacttaggaaggccggggcaggcaagtcacttgagcccaggggttccagaccagcctaggtaatgtagggagacccccggctctaccaaaaatttaaaaattagccaggagttgtggcacactctttgtagtcccagctactcgggaggctgaggtgggaggctgagcctgagctcgggaagctgaggctgcagtgagcctagatggcgacactaggctggagtgagaccctgtctcaaaagaaaaaaaaaacaaaaaacgaaaggagagagaaagggagagcgagagcgagagagagagagagacagcgagacagacacagagagagagaaagataaagagaaggaaggacggagggagggagagagagagggaggggagggaaagggaaggagggaaggaaggaaaggatttttaatcttctctcggaggaggctcatgcgcccgggactcaygccccttcctttcccctctcgctcccagcaggacgcgcccaagcccactcctgcagccygccgctgctccggcctggcccggagggtgctgaccatcgccttcgccctgctcatcctgggcctcatgacctgggcctacgccgccggggtgcckctggcctccgatcgctacggcctcctggccttcggcctctacggggccttcctttcagcgcacctggtggcgcagagcctcttcgcgtacctggagcaycggcgggtggcggcggcggcgcgggggccgctggatgcagccaccgcgcgcagtgtggcgctgaccatctccgcctaccaggaggaccccgcgtacctgcgccagtgcctggcgtccgcccgcgccctgctgtacccgcgcgcgcggctgcgcgtcctcatggtggtggatggcaaccgcgccgaggacctmtayatggtcgacatgttccgcgaggtcttcgctgacgaggaccccgccacgtacgtgtgggacggcaactaccaccagccctgggaacccgcggcggcgggcgcggtgggcgccggagcctatcgggaggtggaggcggaggatcctgggcggctggcagtggaggcgctggtgaggactcgyaggtgcgtgtgcgtggcgcagcgctggggcggcaagcgcgaggtcatgtacacagccttcaaggcgctcggagattcggtggactacgtgcaggtgagtagaggcgccttcagcccactcgtgacccgaacacccaaatcccactttcctggggtctttccttcaatgtacagatttgaatgactctctccctttctttattctttcatccatgcagtggagagattctttccttcactcattctttcatccatccatctatccctttatccaatatggagatcattcgttcatttattcattcatttacccattcaatgtagaggcattctttcctttyttcattcacctacgcattccaggaagagacaatttcactcattcttgactcatccattcatctatccatccattcaatatagagattcatttgttcattcatccactgattcagttatccatccattcaatgtaaaattaagcccttccagccggccactttgagaggctgaggtgggcggatcacctgaggtcaggagttctagactagcctggccaacatggtgaaaccctgtctctactaaaaatacaaaaattagccgagcatggtggcgaatgcctataatcccagctactygggaggctgagggaggagaatcttttgaacccgggaggcggagggtgcggtgagccgagattgcaccattgcactccagcctgggcaacragagcaaaactccgtctcaaataaataaataaataaaagttcttccttacttcattcagtgtagaaattctttttctttactcactcatggatataccatctatccatccaatatggagatcatttactcatttattcattcatttatctattaaatgtggagatttgttccctttcttctttccttcttccctccttcctttcccctccttcagtgttgagattctttcattcaaccactcagccatctatctatgtattcaatatacagattaatttcatttatttatctcattcatccatcccatttggtgtagcaatctttttttttttttgagatggaatctcactccgttgcccaggctggagtgcaatggttgaatctcggctcactgcaacctctgtctcctgggttcaagtgattctcccacctcagcctccccagtagctggtattacaggcacctgtcatcatgcctggctaatttttgtatttttgcagggacagggtttcaccatgttggctaggctggtctcaaactcctgacctcaggtgatctgcccacttcagcctcccaaagtgctgggattacaggtgtgagccaccacaccyggcctggtgtagcaattctaatgcattatattagttttccattgctgcataacaagttaccatatgtttggcagcttgaacraaacacatttattatctcatagtttctatgagcccagagtcagcacagctcaactggatccttttttcaggatatcaccaggttgcaatcaaggtgtcagctggagctgggtcttttttaaggcttggggttatctttcaagcgtatgtatttgttggttggcagaattcactttcttgcagccatagaactcatggtagcagtagcttgcctcttcaaggccagcaaggagactctctgacttctaggtctgcttttaaaggttctcctgactaggtcaggcccacccaggataatctccttttgattaacttatagtcaagagatttggggacttaattacattgcaaaacctattcaccatttccatattaggtaatataatcatggcagttatatcccataacttctgccatattctattgcttagtagcaagttaggggtctcactcacacaccagaggagatggtatatgtcttattgttcatgttcatacaaggatgtgcatcttggagtacatgttaaactgtgactacacattgaaaatgactttaaaaaatctcaaaattatgttcagatcggttgcagagtgccccagctgcattgcaccccttgatgccttcctctcaagcatcagcctgatgcaggggtctgtgctgatcctggccccttccaccttacaggtctgtgactcrgacacaaggttggaccccatggcactgctggagctcgtgcgggtactggacgaggacccccgggtaggggctgttggtggggaygtgcggatccttaaccctctggactcctgggtcagcttcctaagcagcctgcgatactgggtagccttcaatgtggagcgggcttgtcagagctacttccactgtgtatcctgcatcagcggtcctctaggtaagcaggggcagagattgggagggctgtggatggggtggaaagggagaagggaagccggatggggctgaggatgtgactggggttgggaacaaagatgcagcagggcaggaattggggatgggataaaactggaagctggcrgtgaggatgctgcttgggctcaagctgagtttggtgtggggagtgaggttggaaaaargatatggatgacgattggggctggggctggggaagaagatgggataggcttggagtcaaagacagagttggagccaggttwgaggttgcagtgggttttggatggggctgagaatggatatgggattggtgatgagactggggtgggcaggtttgcagtcacagtgggtatagttcaatgacaggcaagttggagtgcgtatgaggttgaggacaggattcgggctggagatgggattggagatagtgctgagattgagattatgatgactgaggatggggttggaactggagatggggttggggctggaaacagcattggagttggtgttggtgacagcagaggctgacactctttcacacctcccctccacccaggcctatataggaataacctcttgcagcagtttcttgaggcctggtacaaccagaagttcctgggtacccactgtacttttggggatgaccggcacctcaccaaccgcatgctcagcatgggttatgctaccaagtaagctgaggggaccaggtggtcgggtatgtgtggaggccaatgaatatcctagcgtgtgtgcatgctgagagttctccaaatccaaagtaactcaccagacaatgggctctatcaagtgagactttagaggagagaggaggataccataatgggcagaggggccatttgcattgagccaatggactctaccaagtgagatattagggaagaggggaagatactataagggacaaggctggcatttgcattgaaccatggaatgcggtgaactctaccaagagaggcaaggtgagggtagagaattccacctagaattgagatagggtgagttggttctgtcatggagaccaaggtagcacagtggggagtgaagtaggaagggcaagagacaaatggatagagtgggatctaactagtgagagagccacggagaaagaaacaagtgagagaagaggagcacctgaactctagtaagttcttcaagagaagacaagtaattccatgagactcaggggaggatgatctagaccaagtgaagttcaggggagagtgatttctgcaaagccaggtccactgaaatacccagaggaaacttgggataatccaagggaatccatgcattaattcactcaacaaatattcactaggtgcctagaatgtttaagctgcggggatacagcaataggcagacaggacaccaattgattacatcagttggggagacacacaagaaataaataagtagaacatacagtatgttcatgatatgtgttatggagataaataatgccgggcaagggtggtggataggaagttttggggttsggggtgaagtgttaagtggagtgcctgaggtaggatggggctcaaggctgagaatagtgtggctggagcactgaactgggggagtattaggagagcaggatggagagttaaggagtggtccactcatgaaaggcttataggtctaaggactctgactaagatgagggagccatgggagggttttaagcagagaagtgacacgttgtaatgggatccctctggcagccgttttgggtacagactacaaaaggcaaggtcggaagcagggaggccactgaggatgccaagtgacacaggggaaggagtctggacactgtcaagtaatgcccaggattctmstcttgtgtgggcttggctggaaaccatgcagggattgattaatgatgtctgccacaaaacaggaaggaggcctgatggttcccttgagaagttctaatacatagactaccctgggtagcaaccacacccatcttgctcctccctatagggcctgccagtaatagtaagcatggtagtattagtaatatgttagtgatagtattagtaatagtgtcagtaaccaacatgatattagtaacagcaatagtaatggtaacagcaatagtcatagtaaaaacggtagtagctaacatttattgagcaaatactatctactggtcctaagcacttggcgtttaatttcattcaatccttacagtatccttgtcttatgagagcctttttttttttcttagatagagtcttgctgtgttgctcaggctcaggctggagtgcaggggcacgatcatggctcactgcagcctcaaactcctgagctcaagtgattcccccatctcagcctcccaaatagctgggactacaggccaccacgcccggctaattttttttttttttttttttttttagagatggggtctcactatgttgcctaggctgatctcaaactcttagcctcaagtgatccccctacctcagcctcctaaagtgctgggattacaggcatgagccattgcatcccacccattggtgcttatttatttatttatttatttatttagtagagatggggtcttgctatgttgcccaggctggtcttgaactccttatccctcagcctcccaaagtgctgggattacaggagtgagccaccgcgtccaggcctaggaaccattatccaccctattctacacatgagaacactgaggcctagagaggttaagaaactcgcccccagtggccgtccacagtggtcatttctgcctccagaatcctgccyaggccccagggagcacgcgatgatgccctcattcctcgcccccgtgcaggtacacctccaggtcccgctgctactcagagacgccctcgtccttcctgcggtggctgagccagcagacacgctggtccaagtcgtacttccgtgagtggctgtacaacgcgctctggtggcaccggcaccatgcgtggatgacctacgaggcggtggtctccggcctgttccccttcttcgtggcggccactgtgctgcgtctgttctacgcgggccgcccttgggygctgctgtgggtgctgctgtgcgtgcagggcgtggcactggccaaggcggccttcgcggcctggctgcggggctgcctgcgcatggtgcttctgtcgctctacgcgcccctctacatgtgtggcctcctgcctgccaagttcctggcgctagtcaccatgaaccagagtggctggggcacctcgggccggcggaagctggccgctaactacgtccctctgctgcccctggcgctctgggcgctgctgctgcttgggggcctggtccgcagcgtagcacacgaggccagggccgactggagcggcccttcccgcgcagccgaggcctaccacttggccgcgggggccggcgcctacgtgggctactgggtggccatgttgacgctgtactgggtgggcgtgcggagrctttgccggcggcggaccgggggctaccgcgtccaggtgtgagtccagccacgcggatgccgcctcaagggtcttcaggggaggccagaggagagctgctgggccccgagccacgaacttgctgggtggttctctgggcctcagtttccctcctctgcmaaacgagggggtcagcccaagattcttcagtctggactatattgggactgggacttctgggtctccagggagggtatttattggtcagggtgtgggatctgaggagtggagggaaagggtcctgctttctcctcgttcttatttaatctccatttctactgtgtgatcaggatgtaataaagaattttatttattttcccccagcctccacctttttgagaactaaggggaatggatgattgagaattggggacgctgggctcagtgctgggtgctagccgtttgaacctggacaagacactctccttccttggaacctggggttccctcttttgaaaacagggattattaatcccctggggcagggttggtgtgagggttaaattactcaactcattcacgggtacttaccaagcacctgccacctgccgcacactggcaggtactgcagatggtgcttttgtctctggtccgtctacttagaagggtaacacatcccttttctcctcaaacctccagcacctcctcccctccctcttagctggcttcctatctcactgagaaaataggggttaaaaaagaaaacttctgctggagtccccatctccacgtcttcccactcacttgcccctgtgtccatacactccaccttcttcctgttgctgagggtgacctgtctgtgctccaagccagtgccaacctcttccatcagggcaccagaccctatgtcctctctgtctgctcaaagacttcactccagcagttcttcccacctgatcctccgtcagttctcctttcgcttcggagcctttcccatcagcatctgaacatattgttactctcccacttttaagacccccactcttgacctcagtttccctgtaaacaactgttccatttctatttcggttaatagcaaatttccttgggagagttgtccatatttgtctccaatttatctcgcacagagttcactcactcaaagtgtacaatttggctgagcgcggtggctcacacctgtaatcccagcactttgggaggccgaggcagggagaccacttgaggtcacgagttcgagaccagcgtggccaacatggtgaaaccccatctctactaaaaatacaaaaaaaattagccaggcatggtggcatgtgcctgtaatcccagctactcaggaggctgaggcaggacaatcgcttgaacctgggaggcagaggtttcagtgagctgagatcgtgccactgcattccagcctgggtgacagaatgagactccatctaaaaaaaagaagtgtacaagtcaatggtttttagttaagtttacaggtttgcacagccaccaccataatctaattttagaacattttcatcaccccacaaaaggaaccccatatccattggcagctcacttctcctttctcacccctttatccccctaagacctgggcagctgctcatctgctttctctttatagatttacctattctggctatttcatatcaatgcaatcctgcagtatgtgcttttttttgtgacttccttcatttagcatatcaaggttcatccatgttgttgcatgtatcactgattcattcctttttatggccaaataatagtccacagtatggctatattgcattgtgtttatgtatttatcagttgatggacatttgggatatctccacctcttggctgtatgaatgatgctactatgaacattcgtgtgcaagttttggtgtgggcacagctttttaattttcttgggtatatacttagaaattgaattgctgggtttatgttaattctatgtttaatttttttgaggaactgctagcctgttttgcacagggactgtaccgttttacattcccaccagcaatgtatgagggttctaatttctctacacccttgctacattttgtattacccgactttttgattacagccttcctggcaggtgtgaagtggctttcattgtggttttgatttgcccttctctaatgactaatgatgttgacttccattaactcttaaacccaagccaatcagatggtcatgctttcccctagctctccatagaaactgctcttgtcaagttcatcaatgatatccacgttgctaaaaccaatagccaattctcagccctatttcatgatttggctgtgtctgacacagttgatcactcttccttgaaacgctttctttacttgacttcctttttttcttttttgagatagggtcttgctctgtcgcccaggctggagttcagtggtgtgaactcagctcactgcaacctctgcgtcccaggttcaagcaattctcctgcctcagcctcccaagtagctgggattacaggcatgtgccaccacacccagctgatttttgtatttttagtagagacagggtttcaccatgttggccaggctggtctcaaactcgtgacctcaagtgatccaccagcctcggcttcccaaagtgctgggattacaggtgtgagccaccaagcatagctacttggctttcaggaagccacagctaccttgctttcctccaccttgttttctttcctggatcctctcatcctcgtctcttacccatctatacccatttcccttgtgcctccagtgttatggctctgaatacttcattcatgctccatgtatggagacgggactcccaaacagatcttcagaccagacttcgcccttaaattccaggcttgtatatccaactgcctccaagacatttctacttggatgcctaataggcatctcaaaccagactcctaatatcttctcgccttcctccctgctaatcccygtgaaacctgctcctccatcagtctatctcagtaaacagaacttcatcctcccagctgctcaggccaaaaaatgctagagctgtaactgtccatcactagccactaccacatggaagtctaaaacatttttttcccattcatgcattctttgattcatcagtcaccaaaacattcaccaagcacctactgaatgccacacactctgccaagtctgcaagtatagaaacaattaagaagcttgccttcaaggagctcttagtcaagtaaacaaagagttaagagtgagccacaggtaagaatactcacataggcctctatgatgctgttgtcatagagcaggaactatgtaatgttaaagttattacagctacctgagttgatttttttcttatttttattttttttgacaccctttcttgcctgaagagctacctaagattatggattcagttcctcagtcgcacaggtcacctttcacatgcttcacggccacacgtggctggtgctgcgctactggacggtgcagatctagaatatttccaacatggcagagggtttgactgcacagtgccactgtggttactcttggcctctctccttctctcatccaacattctgaaccatcagcaaatcccactgattctaccttcaagacatatctagagccactgctcctcacgaccttgttccccagggctgcatctcgtccctggattactgcagcacctcacagcgatgcctgcttccactttgccccagtctgttagccacacagtagccatggaaatcaagtcatgacctgcctgcccttgcttggctcaaaagccacccgtgacgctcatcttttatttcttttctttttttttttttttttgtgacagagtcttgctctgtagcccaggctggactgcagtggtgcagtcatggctcatgtcatctttttttttttttttttttgccttttttttcctgagatgcagtttcgctctttttgcccaggctggagtgcaatggcgcaatctcagctcactgcaacctccgcctcacgggttcaagcagttctcctgcctcaacctccaaagtagctgggattataggcacctgttaccacacctggctaattttttatttttaggagagatggggtttcaccatgttggccaggctggtcttgaactcctgacctcaggtgatctgcctgcctcggcttcccaaagtgctgggattgcaggcatgagccactgcaccttgctctttttttttttttttctgattcaggttctcactctgtagcccaggttggactgcagtgatgtaatcatggctcactgcagccttgaccyctcaagctcaagcctcggtcccccaaagtgctgggattacaggtgtgagccaccacacccagccgaccctcatctcttacagaggtaagtctagactttatagcagccagcagcaccatctggtccccatggtctctgacttcactgtgtatccacttcctaaggccctgttccagctacactggcctcctggatgtcctcccggctgtcctcccatgtgcctggcactcctgcctcagggcttttccctttttaaatttttgcctggaacagttttttttttttttagacagagtctcactctgttgcccaggccggagtgccattgtctcactctgttgcccaggctggagtgcaatggcacaatctcagctcactgcaacttctgcctcccaggttcaagcaattctcgtgcttcagcctcctgagtagctgggattacaggcatgtgctaccatgccaggctaatttttgtatttttagtagagacagggtttcaccatgttggccaggctggtcttgaactcctgacctcaggtaatccacccgtctcggcctcccaaagtgttgggattacaggcatgagtcacctcgcctggccacctggaacactcttcacacaaatatccataatggctcataccgtcatccccttcaagtttttattcaaacgtcactttctcagtgagggcttctccacagatcctactgctacttccctcggccccatattccatttctctgcttatcttctccatcacacatattaccatatttcgtattttactgttttcttattgtctgtgacatagtaagaaatacatatttggtgtttgtccctggtttctgacagtcttatacccttgtactttctggagtgatgtgggcaacagaagcgtcttacatagagctcctaatctcttgaatttcctgggtgataacagcatcgtttgttctattcaagtgactcttggtggtctcctggaagagcgctggtcaccagcaagactaggctatgattaggagcttggagctttcggcctcacccgctgccccctccagtccttggggagggaaaaaggggtggagactaagttcataagcaatcatgcctacatggtgcagcctccagaacaatccctaaactatggggtttgcagagcttccaggctggtgagtgcatccacgcactgacaggccgctgcatcccagctcccatggagacagaaacttctgcacttgggacccttctggacctcaccctatctacctcttcatctggctattaagctatttccttcatactctcctttataataaaccagtaaatatgtttccctgagttattcaagctattctagcaaattactgagctggggggctgcaggttgcaggagcccctggcttgcgactggtgtctgaagtgggggcagtcttgtgggcctgagctcttaaaacctgtgtagtgcgacgctaaccctgggttgttgattttagaattaaatgaattataggacactcaactggtgtccgggagagttggagaactggttggtatgggggcaggaggtagaatcccatacatgtagtgtcagaaatgttgagagtagagaaacagttttctggccaggcgcggtggctcacgcctataatctcagcactctgggaggctgaggcaggcaatcacttgaggtcaggagtttgagaccagcctggccaacatattgaaaccccgtctctactaaaaatacaaaaattagctgggcatggtggcacacgcctttgtagtcccagctactcgggacactgaggcacgagaattgcttgaacccaggaggcaaaggctgcagtgagccaagattgtgccactgcactccaggactccatctcaaacaaaacaaaaaaaaaaaaaaaagggagagagagaaacagttttgttttactgtccactagaatgtaagttccatgtgagtactgtacaaactttttgtctcttctgatttcttcattgggatctctacagtgccttgaaaat

SEQ ID NO: 96153 - DNA, 23436 bp, Homo sapiens
  misc_feature (1)...(23436): n = A,T,C or G
aagcaattctcctgcctcagcctcctgagtagctgggattacaggcgcccgtcaccacacccagctaatttgtgtatatttagtagagacggggtttcaccacgttggccaggctggtctcgagctcctgatctcgtgatctgcccgcctctgcctcccaaagtgctgagattacaggcgtgagccaacgcacctggccaaggagctaattaaggttaaatgaagtcctaatgtgataggaccaacagttttcatgtgtctgctgcacagttaacagacccatgatgctcagacagcagggtttgcagcagagaaagagtttaacaaggcccaggtgaggaggtgaaaggagacgtctcctcaaatacatctccctcaggagttctgagctaaggtttttaaggggatcatggaaggtgaggggctggaaaatgggggtcgctgactggccagggtaaggaggatgattcactagaatgtggaaactgcattccttgctgagtcagctcctgtggggtccttcagagcagctggcatcagtactttcactggtatgcagggcctgaaagaatctcaggctgggcgtggtggctcatgcctgcaatcccagggcttcaggaggccgaggcaggatgaccgcttgggcccaccagttcaagaccagcctgggcaacagggcaagaccccgtcagtatttaaaaaaaaaaaaaagccagatgtgtgtgcctgtagttccagatacttcagatgctgaggcaggaggatcactcgagaccagaacctcaaggctgcagtgagctacgattgtgccactgcacttcagcctgaacaagagtgagaccctgtctctaaaaagaaaaaaaaattaaaataaaaaaaaaatctcaaagggaaaagttaaggtttcataatgttcaagttgttatctctggagcagttaagggtaactgtaatcttataacaagagtctacctgattctgaggcacgaggcgccagctcagaggggctcaccacatgactggtgctgcgtgtgctgcaagctcggttattccatttccccctcccctcttccttgattaattttgtgtttttagtgacggttttctttttttatatttttttaaaaattgagacaaggtctcactctgtcacctgggctggagtgcagtggcgcaaccatggctcannnnnnnnnnnnnnnnnnnnnnnnnnnnnnnnnnnnnnnnnnnnnnnnnnnnnnnnnnnnnnnnnnnnnnnnnnnnnnnnnnnnnnnnnnnnnnnnnnnnnnnnnnnnnnnnnnnnnnnnnnctatttattttgtagagataaataaatctccaaataagtctatgttgcccaggctggtctcaaactcctgagctcaagcaatctacctgcctcccaaagtgctgggattgtaggtgtgagccaccatgcctggccagggatggtttcaataagggtgcaaccctaatccgatagggctggtaccctcatgagaaaaggaagaggtaccagagcattctctttgctatgtgcaactctaaaagacagcccgtaccaggcagcaatctgtcgggcaccttaatcttggacttccagccaataaatgcctattgcttcagttccccagtctaaggtagtctgttgtgacagcccgagcccactgatggtgagaaagactttattccctgtgtggtggaagttgcagcacactaagaaacagggactagcaaaagagctttcctgctccttcagtttttttgtttttgtgttttttttttgagacagtgtctcactctgtcacccaggctgcagtgcagtggcatgatctcagctcactgcaacctccacctcccaggttcaagtgattctcctgtctcaacctcccaagtagctgggattacaggcatgtgccaccacacccagctaatttttgtatttttnnnnnnnnnnnnnnnnnnnnnnnnnnnnnnnnnnnnnnnnnnnnnnnnnnnnnnnnnnnnnnnnnnnnnnnnnnnnnnnnnnnnnnnnnnnnnnnnnnnnnnnnnnnnnnnnnnnnnnnnnnnnnnnnnnnnnnnnnnnnnnnnnnnnnnnnnnnnnnnnnnnnnnnnnnnnnnnnnnnnnnnnnnnnnnnnnnnnnnnnnnnnnnnnnnnnnnnnnnnnnnnnnnnnnnnnnnnnnnnnnnnnnnnnnnnnnnnnnnnnnnnnnnnnnnnnnnnnctgaggcaggtggactcacctgaggtcaggagttcaagaccagcctggccaacatggtgaaatcctgtctctactaaaaatacaaaaaattagccgggtgttgtggcgggcgcctgtaaatcccagctacttgggaggctgaggcaggagaatcgtctgaacctaggaggtggatgttgcagcgagctgagatcacaccactggactccagcctgggtaacagaccgaggctgtctgggaaaaaaagaaaaaaaaaaaaagcaagcagagaacctaatgaacccacgaacccatgtgttcacctgcatctttctgcaattatcagcctgtggccaactccatttcacctgtatctctgaccacacagacccagcatcccaccatttcccctataaagtggatgtactcacctatcaggcctccagagtcttgtggagtgactcttgctcccattgctcctggacagacagtgctggaaatcaggcctgaggctgtcagtggcagtacgaaggacactggatgctcagccacgcagaccctcctatgcccacgccagggctgaggtcagcaggctggggtgtggcagtcatcctttgatcacgcaggaacaccaagagaactgctaggatgtggaccaacctgatgtcactgagtcacgggagcagctcctgcctgcctaacactggacttcatgtaatgtcagatgattaaatatcttaatgctgtgagccacaggaggctggctggtattctgctacctgtgctaaaaggtatcctaagagaggtacaccatgctggaataggcaaaagcaaacctgtttcttgtatcttagtaacacacttcaaggtgcttatgtgcttgagcaattcctgcagtcaaatgggccctccaccccccagtacacaaggcccagccagccagattccctccatcttcaccctcctccccygtcccaggggagccaggaaagccatgcatccaccaaggcggatgcgctgtgtccctctgcatcagcctgctgagtcctcctggacctgatgagagacagtaccgcagccttgcccagccccgggaaggtggtcttccttcctacaatccccttcatcctctggaaggtggtcttccttactacaatccccttcatcctctggaaggcaacaagatggaattttataaggagacatcaatcagaaaaaaggatattacttttattacttatctatgtaagggaatagtaagtactattcttagtacttgtaagcgttcgctaggttgtgctgtggtaacaaaggatcccgaagtctcagtgactcgaaatcacgatggtttacttcttgctggtgctgcccatcagctacaacggctgtacttcatgggcctttgttacaggatctggggtgaaaaaccagccctcactgtgcacatgctgtgttcatgctgggggcagaaggggagggaccaaaccacaaaacaccctttaaagcttctgcctgaacagggcacatgacagcagactactttacattaccatttggaagtctcaccactaagcttgacgtaaaggaagaaagggtaggccaggtgcagtggttcacgtctgtaatcccagcacttagggaggctgacgtgggyggatcacccgaggtcaggaatttgagaccggcctggcaaacatggtgaaaacccatctctactaatacaaaaattagctgggcgtggtggcaggtgcctgtaatctcagctacttgggaggttgatgcaggagaataggttgaacccgggaagtggaggttgcagtgagccaagatcatgccattgcactccactctgggccacaagacagaaactccgtctcaaaaaaaaaattaaattaaaaaataaattggccgggcgcagtggctcacgcctgtaatctcagcactttgggaggctgagatgggcggatcatgaggtcaggagatcgagaccatcctggctaacacggtgaaaccccgtctctactaaaaaatacaaaaaaaattagccgggcatgatggtgggcacctgtagtcccagctagtggggaggctgaggcaggagaatgggatgaactcgggaggtggagcttgcagtgagccaagattgcgccactgcactccagcctgggcaacagagcaagactccatctcaaaaaaataaaataaaaatacaaaaattagccgggcgtggtggtgggcgcctgtaatcccagctactcaggaggctgaggcaggagaatagcttgaacccgggaggtggagggtgcagtgagctgagatcgcgccactgcactccagcctgggggacagagcaggactccgtctcaaataaaataaaagcaataaaagtaaattaaaaaggaagaaagggcataactggtaataacaatataacccatatccttccagaaccccaaactgaattggggaggcttcagtctggaaaacataaagctactctaggtatgcaatgataatataatcgcgagcttacacaaatgctgggagtaaagtccgggaaattgttgccaatgacctcagcccaaagcactgaagtgggtggtggtctcaagagctcatggggaaaaaaccaatgcaaactcaacacttagaaagctaccagcaatttcttggtctacatcagaggcaggtggttctgaaaacagagaacagctttgaatttcatctatatttctggctgagggtgcctcccaagaataatcgcctcgaaaggtaagagtgcctcgtctggtagactgtaatccagggctacacagatgattctgggaaatgcagttcctaccatttcttctgctaagcagagaaagtgatgtctagctgacaactgacaatatggcacatatagatagtagtattttagatatctaaaataacaaaaagtctcacctgagaaatgtccaggcagcctgatatccctaagataacagcaaacactactgagcgctttctagataccggggacacttcgcgggactttttccacctctctatggcagagacagtttttcctattatcatcatgacccacatttcagaggagttggaggcatggaaagaggaaacaacttgcccgttccctctccgtgctataatttgtatacatcatcttttaaaacggacttttcggccaggcgcggtggctcacgcctgtaatcccagcactctgggaggccgaggcgggcagatcacgaggtcagatcaagaccatcctggctaacacggtgaaaccccgtctctactaaaaatacaaaaaattagccgggcgtcgtggcggccgcctgcagtcccagctactcgggaggctgaggcaggagaatcgcttgaacccgggaggcggaggttgcagtgagcagagatcgcgccaccgcactccagcctgggtgacagagcgagactctgtctcaaacaaacaaaaacaacaaaaacacacacacggactttccagagccctgcagttttgcgcttcagggacaacagtgaacatttatcgatcccatggttctcctacaattgccacgtggccagcgtctacacagccccctatcctgcccctgctgtcaaacacagcgtttccagaacgcagtcgtgctgggctccaggtgagctttgggaggagccccggctgagcccctgcactgggccccgcgcttcgggaagcatctcgctcgttcgtctcgcgcgccgcgtgaccggagccctcacgctggcagcgggcaccgcagggccctgagagtcgggcccgctgcgcgcagccaggggccaacgagagccgacgctgggcgggcagcgtccgggagcccctccgaccctgcgctcccctcgtccgcgccctgaccccgcgtctccgrccgtccagcccgcgccgcgtcacctcccctcccggagcgaagggccctgctcgcccgaggacggaggcccgcacgggacacggggccccagttyccgccccggaagcccaggacacggctccagtggcggcgcggcccagggcgcaggcgcgggtgtcggtyccaccgcgcgtcgtcctcgccccggccccggccaatcccttcgaatttggccgaggccgggaaatactagctaatcacggcgcgcgctgttgacgccggccaatgggagctccggaaggctgcgtggagacgccagcggcgggcggtggacagtcatggcggcccggcgcggggctctcatagtgctggagggcgtggaccgcgccgggaagagcacgcagagccgcaagctggtggaagcgctgtgcgccgcgggccaccgcgccgaactgctccggttcccgggtgggtgcgcgcggcggggggtgcgccgcggccttcggtgcctctgccttcccaggggctctttgctccgcttcgttgtctgcggctggcgtgctgtgaactgtgcgatttttattttgaaagacgggctttcgctgtgtcgcccaggctggagtgcagtggcgccatctcggcccacggcagcctggacctcccgggtagccgggaacataggcgcgcgccaccgcgcccggtccacgctgcgtgtctttaagtgcggggtatggtgatgactgacgtgtaaacccgcgcgaaaccgtggtgtctcccccaaaagtctcctccagctcttttgtaatccatgtctcgtttttgtgggtttttctggtgttgtgttttgtttgatggctgttcgcgctttcaggggttttatagcatatatttaaaagttttcaagtgaagcattgaccttaatctttggccacccagtccacaaattttataaatgctttctttgaagtctctactttctacccgagttcttttttcctaaagcatttttcatcccagcttgtttgcagattgctgttattgctcagagaaattcctttggcttccgcagaagatccaagcctgtctagagawttagtaaagtaaaattcaacgtgagacttgagtccgggagaaattcagtccaaactatattgtaatatagagggaaagcctgatctcacttgcattttgtgtgtttctctttttttctagaaagatcaactgaaatcggcaaacttctgagttcctacttgcaaaagaaaagtgacgtggaggatcactcggtgcacctgcttttttctgcaaatcgctgggaacaagtgtaaaaaccattgcacactgctccctctgcccttgccactttccttcctcctgagattcagtgaacgcagcactcgattctgaatgacagtgacagtagtgctgggcctgatgttcttctgtttagcagtcctgtgggcagaggtggtgaagcgccctagttcccaaagggcgctaatgaatgctgtttcgtcctcctgctccccacaccccataactaatagacttcagtttttcgggtttttttagacggagttccgctctgtcgccaggcagaggtgtgatctcggctcactgcaacctccgcctcccaggttcaagcgattctcctgcgtcagcctcccgagtagctgggactacaggcgcgccccagcatgctcagctaatttttgcaattttaatttactttatttttaaatttaatttttgtatttttagtagagacagggtttcaccatgttggccaggatggtctctyttgaccttgtgatccactcgcctcggcctcccaaagttctgggattacgcaggtgtgagccaccgtacctggcccttttttttttatttttaagacaaggtattgctctgtggcccaggctggagtgcagtggcacccgatcatggctcactgcagcctcaacttcctaggctcaagcagtcctcccacctcagcatcctgagtagcttagggccataggggcatgctaccaagcccggctaatttttttttttttttttaatgtagagtcaaggtctcaccatatcacgcccaggctggtctcaaacccctggcctcatagacttaatgttttaaagatagctttaggtatatagaaaaactgatcaaaaagtagagtatgtagagcgctccctacatactacccctgccttccccccttccccattatttatgtgctgtgttatgttacatttgttaaaattgataaccaatattgatacattagtaactgagtttatatgaactctcctaccacctttttttgttttacatcattgtagtaggtttcctcttcattcaacacttaatgttgatgtgtgttctttcaatgtttttatttacatttatatacatatgtagaaactactatagttagaattttgttttttaacataaatgaggtcataccatacaaattatttggcagctttctttctaactctgccttacagatttctgcacttacagatcccctaactctgcccttctcattctctttaattgtcgtcgcattgtctctagaaccacggtacgtgtagccagttccctgctggtgaatcttcagtggttcctcatcatccgtgttacatgaaacactgcattactctcctccggcttagctttgtgtcttgcttggaaaggctgtccccactccaagtcttaaatgaaaatgagaccatttttaataatctttttaacacatctagaatttatggaggcaattgttcttctgattttgctttttgtggctttgtagaaaagtgatgaaacacgtatatgcccaatttaaaatgaagaataatcctgattttactttttagataataatcttatcccaggtacccagggctacgtctcttgtgtccatctattctcctacaggttacttgtttccctaatagatatttaagtttcctctatgtctaactgtggcttgatagtttttttttgttgttttgttttggttttttttgagacaagagtctcgttgtgttgctcaggttggagtgcagtggctcagtctcggctcactgcaaccgccgcctcccgggttcaagcatttctcctgcctcagcctcctgagtagctgggattacaggcgcgtacgaccatgcacagctaatttttatgttttagtagagacagggtttcaccatgttggccagggtkgtcttgaactcctgacctcaagtgatcctcccacgtcggcctcccacagtgctgggattacaggcatgagccaccatgcccgaccaatagttcatgtcttttttgccctaattaatagtcccttgtttggatgtaccatagttcattacctactaaaggacatctttgttgcttccaagttttggcagttataaatctgttataaacatcctggtgcaggattttgtgtggtcataagctttcacttcttttgggtaaatgccagggagcaccactgctttaatatgtggtaagactattaatttttgtgaagaactgctaaaccatgggtatccagtcttttggcttccctgggccacattggaagaaatgtcttgggccacgcataaaatacactaacaattgctgatgagcttaaaaaaaaaaatctcgtaacgttttgagaaagcttaacaaatttgtgttgggctgcatgcagcctgcgggccttgggttggacaagcttgtggtgaactgtcttccaaagtggctgcagcatcttgcattctcaccagcagtgaacaagggttgctattgctccagaycctcaccagcatttggtgttgtcagtgtttggatgtttgccattctgataggtgtgtgtggcatctcattgttctagtttgcatttccctgctgacatatgatgtggagtatcttttcatatgcttgtttgccatctgtgtatctggtttcgtaagggatctgttgagtgctttggcccactcttttttttgggacagggtctcaaccaggctagagtacagtggcacggtcttggctcactgcagcctctacttcccaggctcaagcgatcctcctgccttagcctcccaagtagctgggactacaggtgcatgccaccakgctaagttttgtatttcttttttgttttcctcgagacagtttcrttcttgtcgcccagactggagtgcaatggggcgatcttggctcactgcaacctacgcctcgcaggttcaagcgattctcctgcctcagcctctcaagtagctgtgatcacaggtgcccaccaccacgcccggctaatttttctattttttagttagtgatggggtttcgtcatgttggccaggctggtcttgaactcctgacctcaggtgatccacctgctttagcctcccaaagtgctgggattacaggcacgagccaccatgcccggccaattttgtattttttgaggaaatgtggtttcaccatgtttcccaggttggactcaaattcctgggctcaagtgatgagcctgcctccgcctcccaaagtgttgggaatataggcatgagccattacgcccagccttggcccactttttaagggggttggttgatttcttatttttgagttttaagaattctttgtatgctttagataacagtcctttataaaatgtgtcttttatacatattttctcctaggctgtggtttgccttttctgttttctcactctctttctctcttttctttttttagacagggtctctgtgtcatgcaggctgagtgcagtgcgcaatcacagcttactgcagcctcgacctcccgggttcaagtgatcttcccacctcagcctcccaagtagctgcaactataggcacgttaacacacctggctaatttttgtaaaattttttgtagcgatggagtctcactattgttgcccaggctggtcttgaactcctggacccaagcagtcctcytgccttggtttcccaaagtgctgtgattagaggcatgagccaccctgcctggccttatttttttttaggagaaatgtcttgctctgttgcccaggctggaatgttgtggcatgatcacagcttactgcagccttaaactcctgggttcaagtgatcctcctgcctcagcctctggagtagctaggactacaggtgcgtgccactatccctggctaatttttacattttttgtagagatggggtctcactattgttactcaggctggtctcaaacacctggcctcaagggatccatcccgccaaatggcttccaaaagtgctgggctcacaggcatgagccaccacgtccggctgtcctttccttctcttgacagtgtctctcacaaagcacaaagttattattttcgtgaagtccatcttaatcaattctctcatgggctgtgcctttggttttgtatctaaacagtctgccaaaccccaggtgatctaagttttctcctgtgttactgtctaggagttgcatagttttgcattttacatttgggtctgtgattcattttgtcttttttttcccccactttttgtggagaacggggtctcactatattgcccaggcaggtctcgagctcctgggctcaagcaatcctcctgcctctgcctccttgaaagctgggattacaggcgtgagccaccgtgccaggcctgtgattcattttgaatttatgttcgyggagggtatacggtctggtctagatttattctctttcatgaggatgtccagttgttccagcagcgtttattgaggaaaatgcctttgcaccattgcatccctctgctgctttgtcagaggccagttgactccttatgtgggtgcccctgtgatttgaaggccccagtgagactggctgagtcgaatgaatcggacttttctttctctgtcttgagcagtgcttctcactagtgtcaggccccgtgtctttgtacatctgtgatcttggcagctgtagggatgatggtggacttgtggtatttggctgagaacatccttgcagtccaggctaggggtcatgagcatggatgagtcacctgctggctgtgcccacgcttcccccgccaccatcctctgctctcttctttgcctgtgctttcttcttcctcgacaggrtagagctggcctctctgmccaagacagctgacagtgcatctcctttcccctgccgtgtttctggaacattgaactttaccagttgtgtttgttactatttagtaaggttatcttctccatgttgggttttgctggaggtgtgggtatggcatcttctagagaagatccagacctttttggattaaaagtaaggttacaaatcactgtgctgtacttgttgtcatatgagatttctgagttgtattgttgggataattttctttttctttttttgagatggagtctcgctgtgtcacccaggctggartgcagtggtgtgatctcggctcactgcaacctccacctcctrggttcaagcaattctcctgcctcagcctccygagtagctgggattacaggtgcctgccaccatgtccagctaatattttgtattagtagagacagggtttcaccrtgttagccaggatggtctcgatctcctgaccttgtgatcygcccgcctcagcctcccaaagcgctgggattataggggtgagccactgcgcacagcctgttgggataatttaagcttgacagttcaaggcctatgaaacaggaccagggctcaggagcatcctctttttcaggccgttaattaaggaaaagttgagccagggcgtgaccctcgtcgtggacagatacgcattttctggtgtggccttcaccggtgccaaggaggtgagtgccacttggcctcctgtcaggcgagcacagatgtgtggacccaggactgcccttgaatgcgagtacgagtgacatgcctcagattactctgcagagtttcgtgattcttatattccttttatctctttgctagattaatttggttttatcaataagaagagcaaacatttatgtagctagagattgtttcacagatagaaccatagttggtatttggattatattttccacacgcttttttttttttttttggggagacagtctctcattctgtcacccaggctggagtgcagtggcacgatctcagctcattgcaacctctgcctcctgagttcaagcgattatcctgcctcagtctcccgagtatctgggattataggcatgcaccaccgtgcccagctaattttcatacttttagtagagacggggttttaccatgttggccaggctggtctcaaactcctgacctcaagtgatccactcatctcagcctcccaaagtgctaggattacaggcatgagccactgcacccagcctccagatgcattttcaaagatggttcatttgtagtacttttttcccccgttttttgaaagagggcgtctccctctgttgcccaggctggagtacagtggaacaagcaaagctcgctataacaactcttgggcccaagtgatcctcccgcttcagcctcccaaagtgctgggattacaggcdcgagccaccgtgcccggccacgccctcactttttaattctgccatttcttcatgtgttagcttgagtccttcccctctgaagtattacgttgtataataaggaggacaagactcatgattcctttgcttcttcctgctgtgcggatcagctgacagagccgcaggctctgtgggaggttctcgtggacgccttccctcagctcattgtgctgttgtgtgatgtgtggcctgcagtcacagcctttctggtcctacctttcctccggaaacaggacagcatttggagggagatgggatgagtaagggagggagagagggtgctsgcacagccctggcaagaagggccagtggatgagactaggctggcacataacaggctctaggagtgcctgtcttcttcctgctcttccacgggagaggagaccctggcgtgtgtgtggcagaaaagacactgccaaggacctcgtgcctgtgtccggacccagctgctctgtgctgcaggcgtyctaggccgggggtctccaggggytctgtacatagactgtttgctcctggccagcaggcctgtagctgygctgggagggcctccatggggcctgggctgtgggtggcrgggactggcagccgttctrtctacctacttttctgtccacttgtctgtttacaaaggaaaaacaaaggtgacactggagaaacsgacacrtttgaggttctaaaaattaaacgagccacaatataaacagtctcacrtcttggtacctcaccaaatgtcccctcattttttcctgtttttacgactttcgaaacaaaaacctagactacactaagctttaactgttgggttctttcttggcagaatttttccctagaytggtgtaaacagccagacgtgggccttcccaaaccygacctggtcctgttcctccagttacagctggcggatgmtgccaagcggggagcgtttggccatgagcgctatgagaacggggctttccaggagcgggcgctccggtgtttccaccagctcatgaaagacacgactttgaactggaaggtgagaatcccagaattgcacactaggaagcgtggagaagtggctcaggatgacaccgtggtggctggcacagtcgtgtcagcaaagctgctgccgtttccgtctggtcctcccagatgtggagccccgggagtagtcgttcaggggttctcggtgccagcaaattcttttttttttgagacagaatcttgctctgggtgccaacccaggctggagtgcaatggcacgatctcagctcactgcaacctccgcttcttgggttcaagtgattctcctgcctcagcctcccgagtagctgggattacaggcacgtgccatcatgcctggctaattttttttgtagagatggggtttctccacgttggtcaggctggtctccaactcctgacctcaggtgatctgcccacctcggcctcccaaagtgctgggattataggcatgagccatcgcgcccggccagtgccagcaaattctaacccgatgagttttgctaaatgttgacatttggcgctttgtctggtgggtcaggtgagagtctgcgcaatcctccacatcctcagcccctcttcagacacgagcgccagcctgttcctgccactgtgtcctctggtgcggcctctcgctgggcatgggccctgcagcagcacctggccatctaagttcaggagggtgctgtgtgctgcctctcccttcagtcctgcctccttcartctcagcagtcccaggtctggctctgctcccaggacgctggactctcccctcccagtggactcgcaggctggccgcctctgctcctcccgaccgcagcccctacctctctcccagactccagtcgcccgtgcccaccgctgcccacgtggcctctttccaggcrgcagccagggcttctggcacgtcgggcgccagcactgtcgcttgtggccacggcccgcrgagcttcagtcccttgagctcctcctccagagcagggccgagggtctcgccccagcccgactggctgtgcctgcagatgatgctggtcacgcagcttttcgtttcccggaacgcaggtgggatagcagtgcccttttctggcagtgcggcattctctctggcagtcattccgcccggagaggctcatcttgggcggttctgggcgacagctgtgtggctgcacagtggccagtgagaggcatctgggaaggtggcccttgtgtagggagtcactctccttccgtcacggtcacacctcatgaaatggttagattcttccaagtgccttctacgcccctggcagattttctagaatttgcygtcccagaagcttgagaagkgtccggtgccacccgacagcagaagccgggatgccgctgagaygccagcgcttctgagtccctctcactgcctgccttctggtggagagaaggctgtcctgcgggcttatgccctccccacgctcctcgcaccgttcacgccattgtgcagcacagctgttaggaccaaattcatcttccccgcaaggacgagtcaggcccagtgttgcactggtcctgctgtctggcttctgctgcggaacttcctcaccttccaggcagggcccaggagccacaggagcgtgggcrgggcagggtctgccctctgtgcttccgactcgccgcttgygagctggagggacagtcacctcgacctggtgggctgggtgggyctggctgtgctgtgggctgtgcctcactcctgcaagtgggcactcagcggggttggggtcacgaggctgaggtcggcttaaagcaggagtgggcagttggcacrtcatgtttctcctgcatcagggctgtggcaggaatgccgggtgactaccgtagacacttgtcaaggytgaggttcagagaaaggtgtggggtatcccggaggtcaccacagtgtgccaggaggttcaggttggccttccagagcccggcctgtgtgaaatccccacgagcacagaggacagaacgaaacatggtgttgttttgaracagggtgttactgtgtcacccaggctggagtagagtggtgccacattttttgtagagacggggtgtccctgtgtagcccaggctggtcttgaactcctgggtacaagcagtcctccctcgtgggcctcccaaagtgctgggattacaggcgtgggctcccgtgacyagcctggaacrtgctgatgagcctctttttctcctgaaaccccggtgggaacagatggtggatgcttccaaaagcatcgaagctgtccatgaggacatccgcgtgctctctgaggacgccatccgcactgccacagagaagccgctgggggagctatggaagtgacccaaggctgcccactggagacgcctctccctgcagtcccccgagaggtgggagactcgcrgaaggcccygtccccagcrgagtccagaccccacaacttcaggagctctttcccggcagcagagatctgcaggctgcctcttytgccccggagctggggtgcactggggacccccgtggtggggaccttggcagtgtggacatgagcagagcgatggagcagtctcctgccctctcccctgtcctgatggcactctgttgtattttcttactgaagttcagtgataactctgagcagtttcattgtgatcactgtaaatggtaatcagttggaattctcctaaatgtcttccagacactagtaaaaaamgacctgaaaattgtttgtggaacgcttcacttttcttagactgaggacggagctggctttgaatgggaacctccatcccaggagagaagagccttcattgggcccagtagggccttcctggaccctggttcctgcctagttgagggagtcccactgtgggtctgaacagttgcagccatgccctgggctcgctgggtccagccaggctatatccgagtgtcatcacagcttacgtcctgaactcacctaagttaactctgctattttcattgcaaccctggagcttaacttctcatcctatcctttattttttatttttttggaaacagggtctcactgtcgcccaggctggagtgcagtggcacgatcgtggctcactgcagccttgacctcctgggctcaggtgatcctcctacttcagcctcctgagtagctaggcctacaggccttcactgtgcctggstaatttttttgtggagacaggatttcgctatgttgccagccaggcttgtcttaaactcctgggctcaagtgatctacctgccttggcctccccaaagtgctgggagtacaggcatgagccaccatgccgagcccattgcatccccttttaagtgacacttagaaggaatgatttgacactcctggcagaatctgtcccacagagcacactccgcatagacagcagcatacagtgtgctggagtagaaggcaggcagggtcccccatctgtgggggcagcagctgtgggtctcagcacccttctgtggccaagagacaaacccaggcaaaacaaraggatttcactcttgggtaagcattgccaggggctgtgggatgggcctgggtgaggaaccttcagatgagactttcctggactatccaggtgggcccagtgtcatcacaggggcctttttttgttgtcttaagactgggtctcactctgtcatccaggctggagtgcagtggtgcaatcttgactcactgcagcctctctttcctgggctcaagtgatccaccttagcctcccaaagtgctgggattacaggctggcgccaccatgcctggcccatcacgggtccgcataacagggaggcaggcggtccgagtcaggaaatgagatgccaacagcaaaagctggagagatgccatgttgctggctgtgtggttggaggaaagagccatgagccaagcagtttctggcatccagaagctagaaaggcacagcaacgttctcccctagagcccacagcacgacatggctgtctgccctccgggtctggaagaggctgtgctgttccaggcactgaatgtgatcatcttttagagcagccacaagaagcgaatacgagcatcggagaggccacaagtcctcagccacctcaccggggacccagcagggccccctccggtctggctttgggcccttcacacctataccagggctgcccacagggatgcactggccagagtgagcaatgtcctcaccaagccccctgctgtgccccaggcatggcctcccacaggccaggacagtcactgcgcacttggggaaggctttgctatgattcaaatcgaggcaaaccctgcaactccaggcacttcctgtgacttcctcctgctgaagatgggaaccgccattttactttcctaaaatcctattttccttgcactttttccttctagggttgtatgaggtggctgatgccacggctggtagagagccaggctgcaggcaggacaggccccctgccagggctggggacacacctgctcagggccccacagcccgccacgcaggcagccacatcctttacgtgtgaacgggctgaaacattcacttattttttttctggaactcacattcaattagaacttaaggaaaaaatagacacaaggtttgttttctactgaaacttattatttgccattaagaattgcaaactatactactaagaatgaacaacattctcttcattaagcctttttcaaaacacacgagacaaagctcccctttggtcaaggtgtcccacacattcccactgcagctcccagcacagcggcgcaccatgaactcggacgcggagcccaaggaatggagatcgcaccagccttccctgcttccccaccccaactacacccaagggagaaaggatacgaggaaatacactatgtcttcaatgcttggggggctgggggtgtcctctgctaccaggtgggccggtcagtgccgactgtccggcgcgcgtcctcggggatctcyrgctccccgacctacacaagcagcagcagcagcagcgagtcctgccaacgccgcagtagctgctcatgagaaaagtgcccacgctccccaagccctcctgtttacatttcctagtggggcaaagctactttcccaggacaggcagcagagcagtggggcagagtgcactctgggacccgggacagcaggttacacagggtcaggcggtggtgggtgctggaatcggggctgaggttctggaaatgccaccaggtgatgccaccctgtggtgtctgcccaccacacaccacaagactcaagtggttttccccttttggccctaaaccacctaacacctcagcggcatgggagggcaattctcagcaaggcaaggacatggggaaggctcctgggagaggcacgccgtccaccctcaagcctgactgtcacaggtggaggccccgccccccccgtcaccacacctggggaagctgccacagaatgccacagcactggaaagggacactctgagggcaggctccagcagcagctccaggacagccagccgcccttctgcccaggccgmccacgctgtgtcctgtgcacgccatcttcaggtttcccacacacccacttcctgaatacttttctccccaaagcaaggaggaacctcgccttcgttcctccaacctcatctcccactgaggtagcccttggtaagccaggctgggcagagaggacacagcggtgggcgcgcccccctcgagagcagcccagtccttgggcgtggggccgcagtgtggctgccgctcctctcacgccagcctgcacaggtcttctgagactctgactcagggagcgcccmagaaattcatgtctgtgtctgacaacttcaaacaggactttaattccaaaccaaccacagaaccggcgcctgggagcaagtgggactgaggcccaggtgctaacacggggctggcagtgtcgagagaacgctctggaagctcctaacagacggctccgcgtgcggatgcacaggccctgacgggcactctgagctgggcagtctgacaccaagcagtaaggcctcccgggcagcgcagcctcagtccacgagcacagcgggtggccctctggggggaggcagcacggggcgcagccctcggcaggcgagcgggcgggatggatgaaacgcagcggcaccaggagccccaggctctcacaggtgccacccccgaccccaggattttcaaagggacaggatttcaaagtcttcatcttctgagtcgaagaatctttccagtcgctctacatcagaagaatctagaaggaacaggacatagcgcatcaggcatcttgggtgggccacctgggtgtgagtyaagggcccttggcgtggggcagactgagcagtgcctgctctgcagcccacagacagctgtccccatgcgggtgtgaacaggtccgggggttgtgcagacctgcgaatatggggggagggagcagagaagaggagcagggcagggtgaggagggcagggggcggccggcacaatctcaggcctgaggggcctctgtcccgcgtctgaccctcgtggtcatcaggagtggttccattgccattgccttgtttgtagagtttcccacagggagacagagatgaggaggacgcgctcacggccactcacttcactgcacgagcccaggccggctcctgcggcacgctggccatggtccgaggggtctacgccacccatggccagtggtgcccaagtgaaccagtcccccacccaggactgcgtcaccacagagcctgcatgttctgtctgctccagacccctgaggactccatggtagcacgcccagctccacagcgcccgggcaggcagcgctggtggggaagacgaggtgggtcctgggctgctgggcgcaagcttggaggaggggacgctccactccatacctggtctcacaggcgaaccactgccaagtgctcacggctcaggctcacacacaccttaatggtcaaaaccaagggggccaggactggggaagcaagggcacagatcgtacctccgagggaccccacctggacttggcagctctcacctagggacaggttcaggacgtcggggcaggccagatgtgaaggctgcwgctccaccagctcaaacatgggcagggcacctccragcagagayagctgttagtgagacatggccgttaggtgcagcctcaccccagtgcttgctgcggccaagagaaaggggccagccggccacagccagcggacaaacctgtcatcccatctcactgatgagaaaacagaggcagctccacactaaaggctacacgagaacccagtgtggtgatcaacacacagcacagtctgaccaccacggcagaggggggtgggccacacgcactcggccggcgtagctcagcaccccatcaccacccccatctcaacaggagacggatgaggacactggaaatcccattctaaagtcaacacgcaacatccgtccccagggttgttaactgtgttgccagatgggcaatccaggacgccccaccctgctcagctacatagctgtgccaggcgggacaaagctccccacggcccagtgaggctgcctgagacctggacgcaggccttcgacccctgcacgccccrctgcctgtctccctgggtggctcagctcggctgtgggtgtggggcggctacaaacctttttgacttgctggcaccaatcaytgaagtcatcttcagtcttacagaaaaacccctaaaacgaaatgacgatgagcagaacacgacacccccatctgcagtcggctaagaggtgggggcttccattcccactgccagtggcgcagcagaggcccccagcatgcaggtgctggacattccagcctgccttggctcctgtggccaggaacggagctccgagggtgccctgtgcatggtcccctgcaccagtgcccggctcccctcaggctccactgcgttgctgtgccttgattcgcccacgagatgttacgtggtgtgcatctctcaaacctcaccgagtgttccgggattggggcaggttatgagttagggccaagtggggagctcttctctctgtgactgtgaggcagggccgctgggtctcagccttcgcccagcagctccctggaagcttggcggcaaaggccaccgagaactgcccaaggacaccgtgacacagggagcctcctgctgaggagccaggagacaggggaccggccaagggtcaccggcaatcacatccttaaagctgccgcctgtaatgacagtcactaggaattctcaacgctgccagatgcgcagatgttaacacaaaaagaaacgaaatggggggagaagctcaaactgggcactctcttcccctgaagacaccattctgccgcctcggcgctggtgtaggagcactctcccccggggacaggggacattcctcctcctcacgggtgaggacagttatcccaccaggtggcccctttggtctcaactcaacgttcacgcgtccactcctctgtctgcggtggctggctctctagcctgacctgactgttagagtgycaatcactgtaagccaccaagctgcgtttacagtaacaaacatacctaattctagttcgacgaggaattcgtgactaggttctggtaagaagtgtgcgccaggctgcgcgcagtggctcacgcctgtaatcccagcactttgggaggccgaggtgggtggatcatg

SEQ ID NO: 96154 - DNA, 17978 bp, Homo sapiens
ctaacccatctcttaaagacaaaacaaacaaaaaacttcccacagaaaaattgggcctaggtgttttttttttcaggcaagttttttttttttttttttttgagacagagtctcgctctttcgcccaggctggagtgcactggctcgatctcggctcactgcaagctcctcctcctgggttcacgccattctcctgcctcagcctcccaagtagctgggactacaggcgcccaccaccacgcccggctaattttttgtatttttactagagacggggtttcaccgtgttagccaggatggtctcaatctcctgacctcgtgatccgcccgcctcggcctcccaaagtgctgggattacaggcgtgagccaccgcacccggccttttcaggcaagttctaccataaattgcaggaacagataatccaaatattacgctaatttaaaaaaaattaaagcaatttttttgtttgtttgtttttggtagagacgaggtctcacaatgttgcctaggccggtctcccaaagtactgggattacaggtcagaccatcatgatatcaaaaccatagaggaggccagccacggtggctcacacctgtaatcccagcactctgggaggccgaggaaggtggatcacccgaggccaggagtttaagaccagcctggccaacatggggaaaccccgtctccactaaaaatacaaaaatgagctgggtgtggtggcacatgcctgtagtcccagctactcacgaggctgatgcacaagaatcccttgagcacgggaggtagaggttgcagtgagctgagattgagccaccgtactctagcctgagtgacacagcaacaccttgtctcaaaaaaaaaaaaaaggcaaagggaagccagccatggtgtggacctgtggtcccagctactgcagaggctgaggcaggaggaccattcgaggccaagagtttgaggccacaatgagctatgattgcaccactgcagtccagcctgggcaatagagcaagaccctgttgctaaaacaaacaaaccaaaggcctgttacctacttacagggaagaggcagcaggtggcaggggaggggagagactgttaccaaaacaccaggggttcagtccaggtcctgctgttcgctgcacagaaagccaatcacggagaccaggagcaccgccagggggaaggctttaagccggccgcagccaaggagatgggtgctcagtctcaaatccgtctccctgacccactgaaattaggggtttatagagcagggaagccacgtaactaggtgtgagaaaacaggaattaggggcagctgaagaagaggagttggtcaacaggaagctggtggttggccaggcaatcttgacagctggggggtctggtgtctcattgtcaagataccgtgatctggtgagttttagctctttcattctatctgggggcctcatggttggttttctgagaaaggaactcaaataggacaaatgtcactttctcaaattttaagactaggaggatcaatttctgtgtttattcaaagaaaccataaacatcagttccacgggacaattgagccggtttcaaaatcaaagaaggccaaagccaggcagggtgtggcacacacctctagtccccagctactcaggaggactgcttgaggccaggaatttaccagcctgggcaacatagtgaggccccggtctccaataaaaggagatggggggctgggtttggtggctcacgcctataatctcagcactttgagaggccaaggcaggtggatcacttgaggtcaggagttcgagatcagcctggccaacatggcaaaaccccgtctctactaaacatacaaaaattaggctgggcacggtggctcatgcctgtaatcctagcactttgggaggccgagatgggcggatgctcaggagtttgagaccagcctgggagcaacacagtgagaccccgtctctattagaatgcaaaaaaattagcctggtggcacacggctgtagtcccagctatttgggaggctgagtcagaagaattgcttgaaccaggaggcggagattgcagtgagccgagatcacatcactgcactccagcctgggcaacagaggaagagtctgtctcaaagtaaataaataaaataagataaaatgaaataaaatgctcacagtgccagctagagccatcgttcagaaaagaatttggcacttgctagagaagcagaacacacacttgcctgacaaccagcagttcagatccgggatgctccccagagaagtgctctcaagagcacacatgcggccggcgcagcggctcacacctgtcaccccagcactgtgggaggccgacgcagacggagaggccgggcgcggtggctcacacctgtcatcccagcactgtgggaggccgaggcaggcgggtcgcctgaggtcaggagtttgagaccagcctggccaatatggtgaaaccctgtctctactaaaaatacaaaattagtggggaatggttataggcgcctgtaatccgagttgctcaggaggctgaggcgggaaatcgcttgaacccaggaggtggaggttgcagtgagctgagatcgcgccactgcactccagcctgagcgatagggccagactccacctcagataaaaaataaaattaaaaaaaagagtgtatatgtgcagagcagcaatctcagcaaagcctaaagccagacactgtgtgttcaccagctgcagcgacacgccgtctgcatgttctcactcacaggatggaatacagcaaggaacaaacaagccacacctctcagtgtcaacagggtgaatcccaaacgcgtaacgtgagtgaaagaagcaagtcccagaacagcacgtccagcacatcagagaccaccaatggggtcctgctgccaccctggcattgctcttaccaactgtgcatatgtgcacctcccattctgttgtgtctccgacctcgaacaggacagcacaggcttccccgcctcccgtgggcctttgcaaagtctgctctccccaggccagtgggtgccctccccacagggctccctgtgcatgcatggagcctggcgtgctttgggcacccaggagtactactcagcaagcgtttgttgaatgacttaatgagcacctgcagaaagggagcagtgagtgaaaggcctttcacaattaaaccatcaaggtgtttcggccacagcacaagtttcttttttttttttcttttgagatggaatctcgctctgtcgtccaggctggagtgcagtggtgcagtctcagctcactgcaacctctgcctcccaggttcaagcgattctcttgcctcagcctcccaaatagctggaattacaggtgtctgccactacagccgactaattttttttttttttttgactcgctctgtcacccaggctggagtgcagtggcgcgatcttggctcactgcaagctccgcctcccgggttcacaccattctcctgcttcagcttcccgagtagctgggactacaggtgcccgccaccacgcccggctaattttttgtatttttagtagagatggcatttcactgcgttagccaggatggtcttgatctcctgacctgatgatccgcccgcctcagccttccaaagtgctgggattacaggagtgagccaccgcgcccggcccacaaccggctaatttttgtatttctattagagacggcgtttcaccatgttggccaggctggtcttgaactcctgaccttaagtgatccacctgcctcagcttcccaaagtgctggaattacagacgtgagccacacagcacaagcttctgatgtggagactgaggcagggcagccaagatgtcagcaggcctcaggaaagcccccctccctgggaggtctgagccctgcgtgggcgggaggctccgagttccctcccccaggggttctcccctaacctctctgcatccgcatgttcccagctcagccggggtcatgtgcagcacatctggaggccccatccccgagagggtcctggaagccgagagctgccccacccagaggcccctccaccccttcagctcctgccagcttccctctgacgctctcccaagtctgccttccagggtccctgagtccatgccaggaaggggcgttcccccgccctcactccgtctcaaagagagctcagcctcagcctttgtcctggccgctctgggctccctgcctctccctccgcaggcgaagctgggcactcggccatgagcctgtctccccggggcagagtccagctcccctctccctccccatcctctcaggcctggcagacctcccactccctggcttgagctttttgtccatgaaaagagtccagaacaccaggaagccccgctgggcctggagggaagcggggtaccgcaggccagtgggggtcgcagcaccctgcctctgggcggcctttgttccttccttttcaggcatgatgtgcactgtgcgtgcctctccctcctctgggcggtcaggggtggaagaaaggcctggggtgtgkggggggaaactggggcctggggcctggagcttagcaccggcaacacccagagattgcctgctggagccccgccaggctgggctgtgaggctgaggcagcagagaggcttcccagggttcccacccctccctttggggtcctgagckggaagaaagatgcctttactgggcctgtggcgccagaccctcagcccaggcagcaatcccagcacaattgtcactgcccgttccagaaggccgggcatggtctggaccctgccccatggggctgccctttgggccccagcagcctgcactccctggtggccttgcctcgtggctccctgacgctgtgtggctggaattattgggacaagaattcccactttgcagcaggcgcaaagggggtggcccctggccgggctgggatgcggggcctgtgaggctgcagagccgaaaggccagccatgtcgtgggacggaggagcagggcttgcgtctggggccagctgcgcttcgcctgccccagccgtccccagaagcctgttgctgacccgcaccccaagcytggcctggggaccctcttccttgcctttcaggccacgtagaggccccacctgtttccgtcctggggaagcctcctctggcctccgcagcccaagcctctgttcccctcaggccgagggggcagcaggcgcggccgaggccctgggctgggaggtatggacctttggcccggtctgtgctgcttctcctctgtttctcggctcggtgtgacctgggccgtccctccccttccccgttcctgcgtcctcaccttcacctcagtacagggcccaggtgaggtggatctgactgggcctcaagggtagttctggcctgggtcagctgcgtgtctctggagctgamctgcgctggctcagcgccgcaggctggcggatccttgctggccgggagggcatcccgcaggccagcctggtcctcaccagccctgggagttggcgctcagggccctgctccacaaacaggtgctgaccctcggcttcctcctgagtccccagcccgggccccgcgtggctccgcagccgacagtgcctcattcctgcaagcgagtctggcctcctttcccgggcccgggaaaagcgcggctctccagcacaggaccctccgagccagcctcgcccgcccacccccacgccaggtctcctgcctccacggccgggggatccccttgctgagtgggcgggaaggggaaggtgggccatagccgcggggcgcccgggctcagacccgggagccggggggcrgtgctggtgactcagccgcgcccgcgtctctcacctgcgcgggccggacggcggaagcttgggagcggaggcgaaacctgtccgcccgtgggcgtggccggtgatgggcgggcccgcccggcctcccgcccctcgtcccgccccggggcccctaccccgcggtcccgcggccccgcccgcctccgcctccggctccccgcactctccgggtccacgcatcgtcctcccgcgcgcccgcccgcccatggccgggaaggtgcggtcactgctgccgccgctgctgctggccgccgcgggcctcgccggcctcctactgctgtgcgtccccacccgcgacgtccgggagccgcccgccctcaaggtgcgcgcccgggcacccagcgcacgtctggggagcagcgggccgggcttggagccggggagggggtgcggctgggaacctgagcaggatcagcccgggacccccaccgtgctctgctcctggcgggctgggtggggtcccgggttccgcgctctgcgctccccgaccgggtacgcggagggggcggggggcggtggcgcttccagggcgacgcggtgctgaaggaacaagtcccgggagttccgcgcccgccgccgagtccgtcaacgcagcccaggggctgtgtccccgctcccgggatagcccagcgatgccccctgggtgctgccggacgcccgcccccaggcctgtgcgggcccccaggggcactccgggccacttctgccctgtgccgccgccccggagggtgcggttagagccacatcgactgggtattcagcccagatggggatccacaagccccaggacccagggcccccgccaggacacgagagtggcccagaaagacaggagggcttgaccggagcagccctggccggtcctcaaaaggttggagcaggctagcctggatctccactccagcaggcccagggacctcctggtcggcccctttaaccctttattgggcttgtaggggggtggggtggagagccaagtcccccagcctgatggggagtcagaagcagggagctctgcggccctgcaggacggccatgtggcggtgcacgcgctgacctgttgatgctctgggctctggggaagccttggtcgggatggactggtgcggccctctcggaggctggaattggcgcccgggcctgggaggctggtccccagctttccaggtggatccaggatgatggggcaggagctggaaaagggcatttacaagctcgtgccactcaggtctgcaggaaggcccacccagcacccccaacaaggcagggccagcctctctctctggccctggcttggaggcctagggagagtgtctttagagctgacctggctctgaggcccacggccagcctcggtggaccttcttcacctggggccctgcctcctgcatcctcaggttgggctgccgtcagaggagctggaaggagacagaggaggaaggaagaggggaggaaggaagagggactctagggagctcctcttgcagaggagcttcctctccctgagcctgggaaacttgtgccccagggaaaagtccctggggaccctctgtccctctgtccctgactcagtccctcagtctgcccttgccaggaaggctgctgcccagaccctggcatgctggcttcaggtagtcaggagggaagagtcacctcccccccacctccctgttctccttccaaccacggcctcagaggaggccctggcctcctctgagcttcagcatgaggcttggcacatgactgggtgggggggggagcggtggcaaactggaggaacccaacttcacgtttggtgtcagggtgtcagggcccccggacaccccaggctgactccctccccctcccccscagtatggcatcgtcctggacgctggttcttcacacacrtccatgtttatctacaagtggccggcagacaaggagaacgacacaggcattgtgggccagcacagctcctgtgatgttccaggtgaggcccagcccagcccagccaggacgcccactcactgcagggtctctgggaccctctccagccttagccagtgcaggtccttctgcttagtgttgggtggggctcactccaggcagaagccctggaaagagagaggctggtgcccctgcgcctgagtggggccaggagtcgtttgcattctagaaaggaagcctaggcagcaggtggggaggtttgagcctcgccgggcccagtattggcttctgtgccccagatggagcaggaggaggtctgggggcctggcggacacacccaggcaggcctcaggaggccaacctgggttgaccatgcccagggctttgtcctagcacctrcacccacaccctctcagcaggcagcagccttggtctccgggtggcacctgggcccctttgtctccaacctgggcgtttctgggggcttaagcagggaaggtgtgccacctggtctgggagcccacggcccccacccccaccctcactctcctggcctacggcccacctaggggctgcccgtgaggcataggctcatctctctgcctccctctaggtgggggcatctccagctatgcagacaacccttctggggccagccagagtcttgttggatgcctcgaacaggygcttcaggatgtgcccaaagagagacacgcgggcacacccctctacctgggagccacagcgggtatgcgcctgctcaagtgagtgtgcctgtgccctggccctgtccccatgatggcctttggctgtgaccccttgcagggyggactccgagcacccctacagcaggctcacagccacctggggagaaggcctcttggagttctctgtgttttgcagcctgaccaatccagaggcctcgaccagtgtgctcatggcagtgactcacacactgacccagtacccctttgacttccggggtgcacgcatcctctcgggccaggaagagggggtgtttggctgggtgactgccaactacctgctggagaacttcatcaaggtgggcccagcagccagccaaagagccagggrgcgtgggcgccctcggcccctggttgaccccacactcccctctccacagtacggctgggtgggccggtggttccggccacrgaaggggacactgggggccatggacctggggggtgcctctacccagatcacttttgagacaaccagtccagctgaggacagagccagcgaggtccagctgcatctctacggccagcactaccgagtctacacccacagcttcctctgctatggccgtgaccaggtcctccagaggctgctggccagygccctccaggtgcccctccaccctggctcacctgcactgcactgttccctcctggagcagagcctggacagccactgtgctgtggaaggcttctccaggctgggctttaattggctggaaagacaggtgggagggtcagagcatgagcaaaggcccagtggctgggctggrcctggagaagggagggccagggacggctctcagagggagcctggtcaggggcgttgggatctgtcaagcaggcagtggggagccatggattgcccctgagcacaaaagtgaagttgccagagtgagacctgtgggaggttygtcaggctggtcctctggagcggtggtggtgccaccctgtcacgctggtgattcccccagacccacggcttccacccctgctggccgaggggcttttccacccaagtgctgctcggggatgtgtaccagtcaccatgcaccatggcccagcggccccagaacttcaacagcagtgccagggtcagcctgtcagggagcagtgacccccacctctgccgagatctggtttctgggctcttcagcttctcctcctgccccttctcccgatgctctttcaatggggtcttccagcccccagtggctgggaactttgtsgtgagtaggggcaggcgggtggctgggaactttgtcgtgggtagggacaggcgggtggctgggaactttgtcgtgggtagggacaggcgggtggctgggaactttgtcgtgggtagggacaggcgggtggctgggaactttgtcgtgagtagggataggcgggtggctgggaactttgtcgtgggtargggcaggcgggtggctgggaactttgtcgtgagtaggggcaggcgggtggcggcaggtgctctgagccgctggggttcggtcacagtgtgactgcgccccctacaggccttctctgccttcttctacactgtggactttttgcggacttcgatggggctgcccgtggccaccctgcagcagctggaggcagccgcagtgaatgtctgcaaccagacctgggctcaggtgagccccrctcccactccttcagggctgtgcggaagggctcagcctccgcctccgcatgcctccccagccctgcatggacaggcctctcggagcacccrctgcagtgggggcgatggcaggcattaggctgactccagaggtggcgtggctgtgkccggtaggctgtgaacaagtcgggcgggttggagaagcttcgccaggcccgaccctcatcccagatctggagggcagggggaggccggtgcccaggtttctggcttctgccactggttccctccatggtaccacacaagggaagatggaagtgggtctgggcaccgsgagtgtgcccaccggagactccaagagaaacgtacgagtcgtcccaggaccggggtggtgagcgaggccccattttgtcctcccagggcctagtctcagacagactggggtgagggaggtggggacaggcggcgagccagcgggcagactcaggcctggagctcgtcctgttcccctggccacacaccaaggtgttgctgcctcctgctccctggtggccatgcctgctgtccctcctcactggccttccaggcatgggcgctggctggggagggatggaagcgtgccctgccgggggtgcccctcggactcggtcttgccattcgtgtccgggcctgtgtggtggtctctggcctcgcacggcccgtgtgtgtctggggaggggtgaagcacgccgccggccccctctccccgtggggccgagacctcctggtggtcgcctgcctgatggtgtcccgcccgcgtcccagctgcaagctcgggtgccagggcaacgggcccgcctggccgactactgcgccggggccatgttcgtgcagcagctgctgagtcgcggctacggcttcgatgagcgcgccttcggcggcgtgatcttccagaagaaggtgggctggggcggggcggggcggggccgaccttgcggggcggggcctctcgggagctgaggccacgcccttccccgcaggccgcggacactgcagtgggctgggcgctcggctacatgctgaacctgaccaacctgatccccgccgacccgccggggctgcgcaagggcacagacttcagctcctgggtcgtcctcctgctgctcttcgcctccgcgctcctggctgcgcttgtcctgctgctgcgtcaggtgcactccgccaagctgccaagcaccatttaggggccgacgggggcagctgccccatccctcccccaacccctgtatccccaccccgtactcccacccctcccacaacccctgtacctcccacccctgtatccccacccctccacccacccctctcccaacctctctccccgcccctgtatcctgcattcctccacccaccctctatcccccaccgctccaccccaccactgtcttctccatccttccaccccaccctcagcgtctctgcccctaaggcagcccaggaaataggaactgagactctggtacccacaggagcctgggtgggcaaagagcgctcaatccagctccttgaacccctccagcccgcttcagcctgggcatcactgcaggccccgtgctcctcctcctcctcctcagggctgggtctccagagagtggggccttggtcctgagaatcagcccttagaggctccttctgtgtagtctgggtctgtactggggagggtcacagcccacgggctggcagccagcccagcacctacttgtaaaaattttgtaataaaaagtttttcctagagacgtgaaaggagagtgtctgtggggtggggcatccttgctgtggcctgtgcccccaccttcccgctgttctagccgcacgggcctgcccttggtcctgagggtggacaccatccctccctactgccttctgctctggagccaggcctggggcactggctgctgccctggtgtgccgtggcagcctagagtagctgcaggatggctggcccgagggaatgttcctgggcccttgagtcttctctggccagcagagttccccaaaaccatcacatccagatctgcgttggtgaccaaggccagactgaaggttgggtcctggtacagtgagcctgggggtgagggtagaggtcagggaggtggcggagagtgggtggcagccagccaggcggcttcctagggggcagtcagtgctggtagagactggcgggagggcaggcccacatcaggaggtggcacaggggtgggagatgagatcaggaccaggacccataggcaggaatcttgcacagaacctggctgtggagctgagccatgcaatggcacagggcaccttgcccttctcacctgggactgagtgtcctgcacctccaaaaggcatcctgcagccccagccaggccctgcagcccctccccaagccagttttctccaggatgggaaggcctggtcttgcccactcgcctcctcaccttcctgggaagtgagcttagacactgtctctatgctcagtgccctggcgaggagggtggtggttcttattctgctcttccctcccctcttcaccatttttttttaaagtcatttgataaacctgagggcagccagccccagctttggagttctgagactggaaggaccaaggggacaccccgggttggaggtctcactcttgttctctgaatgactagtcaaaggaggtttctagtgggatggggtgggcgtgctcttgggaggcaacaggtgaggtgcaaggggggcatcagagatgcccgttgtcagctgggcacagtggctcacgcctgtaatcccagcactttgggaggctgaggctggcgtatcacctgaggtcaggagttcaagaccagctgaggcaacatggtgaaaccccgtctgtactaagaatacaaaaattagcccagcatggtggcacgcgcctgtaatcccagctactcaggaggcagaggcacgagaatcacttgaacccgagaggtggaggttgcagtgggccgaaatggcaccactgcactccaggctaggcgacagagacgctgtctcaaagaaaaaaaaaaaagatgcccattgtcctgagggagctaaagggctgtcacctggggaccctgaacaccttggacagctcccagctccggtcctcagtggctccggatcactcttgccccctggtggcctcactgagcgcggccgccgcggctccagccaaagctgcagtcggggccggggccgttctgtgttcctgtatttgcttttcccgcgagtgggggtgcccctgcctctgtgggcacacctgtgccttcctgtgcacctgcccagctcgtgagcacctgtctgcgtgcgcccggcgctcctgtgtctctgtgcgctcgcgaggctaggcccacacaggtcctctgccccatcgcgggtgcgggtgaggggctcggagtcctaccgggaagaggccagaagggagcgcatcctggagaagcccacccgcggcccaaacccagccggacttctgggaaccgcaccggccccagagaccgcaggtgccgagacaccctgaggccgagagaggtccagcgaggcccggagaggggaccagaactggagcagggggagggggcgcagtctggagccgccctcccgccccctcaggtggagcgcgcaggcgcagtctccgcgtgcgcgcctcgccggcgcctccatcccggatccttgctgcagcgtcagcgccgccgcccgtgcctttcctcttcctcctcctcctccttggcatccgcctcttcttcctcctgcgtcctcccccgctgcctccgctgctcccgacgcggagcccggagcccgcgccgagcccctggcctcgcggtgccatgctgccccggcggcggcgctgaaggatggcgacgccgctgcctccgccctccccgcggcacctgcggctgctgcggctgctgctctccggcctcgtcctcggcgccgccctgcgtggagccgccgccggccacccgggtgagcgagcgcgctgggcgcaggccgcggggcgccccggggccgggatcgccgggcggggaccgggttgccgggcgccgccgccctcgtcctgcccaggcccgcaggccctgcaggcctggtccgctggtggcgggggccccgcctcgcccacgatggaataaacaggcctggccggagggcgcagcgcggagcctccaaaaggccgcgccggatggggcttctgccggttcccagaggcgtaccttacattcatggcttcttccgccgggagcgcgtctggctcaggcctccgcgccgcggccatctggctctgggcgggcccgccgggagtctgcctgtgtgcgtctctgtgtctccgtgttcggggctcctgcgggtgtggggctggccctgagtgcccgccggcttcgctgccggtgcgcgtcccggggtcggggcctcagtgctgctctgcctgtcctcacgccttgggtggcgctgggcaccggccttgtgcgccatggtgggcgctgaagttctgggggcacttatggcgcaggctcggggtgctgttctagcttcaataggagggagactgttgcagcctcagagcctccgcctgcatcccctgccctcgagggcactggcattctgtctttgggactgagggctgcaggtggactccggaggagggtgataagcccagggtcctgggacaccctctcacctgcacagatgggtcctgagggtccagagagcagagctccctgcaggaacccaggatgcaaagctgacgtttttctggggggactgaactgggagactttgcgactgcattcgtacagtactcctggcagccctgcagaagaggtgctgtgagcccgttttacaggcaaggaatccgaggcatggagaagttaagtggattgtggcacagctgaggcgctgtcctgggcagcctggttctgtgtgtgtggcctcaaggggccagagtgaggccggcttcctcctgggctcagtgcccctggatgggaggtgggcatgaacaggagaggcttccgagaatcagagtgtgctcagccaggaaaggcggaggccacctattcaggaaacggggctgcagctgctgtgctgagcccgggtgggtggcrggtgccagtcctcagttcaccggcctctgcagcttcgtgtctgcctcaccgggagacctggcagggccctccctaggcaactcctcccattcccagtgcccagtgcttggaagggagggccctcaggcagcccagacgttggcgggtggaggggggtgtgccagccaccgtccagctgctcttgttcctgcgacctcttttcaggaggaggaagtgggggatggaggctcctgggctggggaaaagggctaggaggggcctggaacccagaccctagagccagctttgtacctcaggcccctgcctttggcgtggtggacggtggggtatcagcacaggagcggggactgcctcactccccaggtgccaagttggcgggtgggcccaggtggacctgctggcacaggtttaatgtttaacgtgcccaagtcccggcccactgatactggaggctgctgccccaggttgtggagggtgtgcggtgcctggcgttggctcctgtgcccacctgccactgcggctgctggaactgccttgaaggaaggcggacagcctgagggccctgagtgtcaggttaccaaggaaaccaagccagccaaccaaggtctggagaaggatgatgccccgtgtggcccccgtggccctgcctgcagtgtgcagtgtggggctgggcagagaggaagagtcctggttagccagaggtgccaccgcagactccccaggcagggttgatggccctgctggggttcccctggctccactggcttgctgtgactggggacattccttagctttgaggcaactcagctatatcccagaggggaaactgaggcagagggccattgccccctcgccccgttctccagcaccaggataagactgattagccacatgtgtcagctggcaccgtggcctgggcccctcatcagcgagatgaaagtgtggttaggaactagggaactagggcctggcctgccatccccagcactgccaacctcggcctcctgaggccctcgggtgccacctggcccctgactgcagcccctggtgtggtggctttgggagtgacctgcctgggttctgtgtctgaggccagtgaggtcagcagactccatcttaggtgtcctcggtgcctgggggacaagccagaggctggaggagcagcatcccttccaggctgcacacttgtcagtgccgggttctggggagagccgcacgggaaggagaggtcgctggcggcatcgtttgctgctccccagagacagacctgggcccttccctctgggactcccaatctggacggggttcctggcttgctgtggggcatgttgaggccggaggctgggcttgtggggctgcacggccctgcccaggagaactcagcactgcctggacggtgaggctcagcttctgagctgagggctctatcaggcctggaagtggaccctggggaggggtggggcagggtagttctgataagtcctaggactgttcgcttccgggttctgagccctggcgtcagggaggaagggcatgtccagaacaatggccagaaccaggcccggccagctcggggggtgacgggggcgggtggctggggcagcgctgccgtgtgcaggggccgagccctgcggggccgtgagccggccctgccttctgcttccttcccagatgtagccgcctgtcccgggagcctggactgtgccctgaagaggcgggcaaggtgtcctcctggtgcacatgcctgtgggccctgccttcagcccttccaggaggaccagcaagggctctgtgtgcccaggatgcgccggcctccaggtacgagagcaaagggggaagtcgatggggggatgtccctgcatgaacctctccctgtaagaagcggccggctgggcgcggtggctcatgcctgtaatcccagcactgtgggaggcccaggctgttggatctcatgaggtcaggagttcaagaccagcctggccaacatggtgaaaccccgtctctactaaaaatacaaagtagccgggtgtggtggcacacacctgtagtcccagctactcaggaggctgaggcaggagaattgctttaacccgggaggcggagcttgcagtgagccgattcaccactgcactccagcctgggcgacagtgcgagactctgtctcaaaaaaaaaaaaaaaaaaagaaggccgggagcagtggctcacgcctgtaatcccagcactttgggaggccgaggcgggcacatcataaggtcaggagatcgagaccatcctggctaacacggtgaaaccccatctgtactaaaaatacaaaaacaaaattagccgggcgtggcggcgggcgcctgtagtcccagctactcgggaagctaaggcaggagaatggcgtgaacccgggaggcagagcttgcagtgagccgagatcgcgccactgcactccagcctgggcggcagagcgagactccgcctcaaaaaaaaaaaagcagcagcctgcagcctcaatgcccaggcctgtgccaggtggtcttggggcccctggaccttgtggggtgttgggtccaaggcctgggagatcctcattcactctccacgaagcctcccatcctttccaaatggaggtgggcccaggcctggggcagtcaggc

SEQ ID NO: 96155 - DNA, 35447 bp, Homo sapiens
  misc_feature (1)...(35447): n = A,T,C or G
cacagggcctgccgcctggggcatgactttgcagacgctgccatccaggagaaacgccacaccctccctagccagggtgttgatgacttcctccaagccaaagccaagtccaagaccttggacttcattgatgtgctcctgattagcaaagtgggcttctctgagatttgaattcaagaagcagaagggagcttaatgtcaaatatcagatcaaagaacttagacttgatccagagggcactggggagtcatggcaggtgcttgaggaagggagagacaggtcagagataggttttagagatgactttgctgaatgcacctagcaggggactgctagatgtgaaactgacaagtataagattttactctatttatgcattaataagctagtctatataagtattaatatatctatatctatatctatatctatatctatatctatatctatatctatatctaatgtctaggtcattgtccatgcctgaatttgtgtctgtgtccatgactatgtctgtgtctttgtctttgtcattgcgagtgtctgtctttgtatctgcttctttttctttcgttgtgtctatatctatgtctttgtgtcttttctatgtctgtgtctgtcttttctttgtctatatctttgtcaatgtctatgtttatgtctttgtgtatgtctgtttatatctttatgtatgtcttcatctcagtctttatgtctatgtttagtgtcttttctgtgtcaatgtctatatctagatctatgtgtctttgttcatgtcatatctgtgtatctatgtctttgtctttttctgtgcctgtgtctttgtctatgtctatgtatatttctgtgtctctttgtctatgtgtatgtgtatttctatgtctatgtctatgtctatctctttctctttgtcgatgtctgtctatgtatttatctacatctttgtcaatgtctgtctttgtctatgtctgtgcctatgtctatgtcatgtttatgcctttgtatatgctcatgtctatatctttctctatgtctgtgtctgtctttgtctaattcttggtctttgtcaatgtctacatctttgtctatgtctgtgtctttgtctgtttcttttctttttctctttctttcttttttttttttttttgagaaagattcttgctctgttgccaggctggagtgcatgcaatggcatgatctcggctcactgcaacccctgcctcctgggttcaagtgattctgcttcagcctcctgagtagctgggactacgagtgcccgccaccacgcccagctaatttttgtatttttagtagagatgggatttcaccatgttggccagggtgcgctagatcttctgaccttgtgatctgcctgccttgacctcccaaagtgcagggattacaggagtgagccacggtgcccagcgtctttgtctgtttctatttatgtctacatctacatctttccctacgtttatgactttgcctatgtctatacctttgtctatgtctatatctttgtctatatttgtgtctgtgtctatgtctatatctatgtctttctctatgtttatgtctatgtctttttctgtccatgactttttctattgtgacagatgtctattgtaacaagtgcattgaacacctggatcacagcagcccatttattgctcacagtgacactagcagccggagtaggattgtagcattggctttcattcccaaatcacatttctccaagagcaatgcaatgtttttatctgtatgtggaacagtgtttgcgccctaggagaggggctccacattacgagtcttggcacattttctatttattttctcgacagagagagagagagagagagagagagagagagcgagagcaagagagagtgctttattctgaagcataaaccaattctctccagtgagatgtaatagtctgtagacttacaacacaaatgtcttcaggggaaataaataagattgtctgcatttaccacactggaatgtgagtatacatctttggagcaatacttaatctctaacttccaaggcgaattgttatttaattatcctgtaagctcatttgccagtaactttttctcagaaagttctcaacatgtagaaacatgaaaatattcatgtgtcgttgattcttcccaccagggacaaaagaagaaggaaggaagccagtgaggaagattgcatggtgtgggctctggtgatggtgaccaagagacatctaggagtgcaagctgggcttgggtttctggaaagaggatggatcttcagagtttatttcatgttagactgaggagtcctcagagcttgtgtggttttcaagggtgtttttccttctctccaggatgaagatgggaaggagttgtctgatgaggacataagagtgtaggctgacaccttcatgtttgagggagaggatcccagtgaggaccaagatgtctcatcccagggacgtggtgggtggaccctggatggcttcacccttcccatcccccttcccccatcctctctgaggccctcaatccatgggtgctgtccaccctgttgtgctgaagcagcccagagacccaagactgcctggctgcccctcaggctatgacaccaggaccagtggtctctcctgggtccagtacaaccttgcaatgcacccagaatgccaggagcgctgcgggcaggaaaggcaagagtttctgaaggtctgggagcctaaagagattgaatggtgagtgcaggtgctggtggctgttcctgagctccatgactcatgttggcaatgccgatggctctgctccccaggtggggatgggaggaggagttgtttttgtctattctgctactattgcttagtgggagtaggagtagaggatgacaggcaaggcttaatacccagtctggctatcaggggagaagttgcaggctgtttggacagcaaagatctgctctgctgagagaattggtgacaacatgtgaggggagatgatgccacttaacacatgtttagtagatgaacttcccctttactcccttctttttatccctgaaatgtcattttgcatgcataatctgttttcgttattgcaacaaccttgtgaggtgctgctgctgaaacgcccatttacggacgtgaaggagcacagcctggtggtgaggggggcacaatgtgaggctgggtgggtggtctgggtgcacagcccagatccaccagctctatgactgtgggtagtcactcaaatatttttcagacttgatttctcatttgtaaaatggaaaaacaaaatggttaatacagttaaaagacttaaaacaggctccatgactcatgttggcaatgttgatggccgccattcctgctctaacctgcttgcccatcccaggcacacaggaggtctgcagtgagctgagcccctctagccactgggggcactttcttctgtgtccctaggaccctgcctgttcatcaacctctggctttgctctctgagcctaagaaggatggaaccaccagcaggtgaggtctgtccttgcagaggtagtggggattttgggggatgcaccctacgcgaatgaggctgtaggaccaggtgcctgaatcccctggctgattgagctggcaggggtagtggggtgggggtggtctaggggctccccagtacccagccagtgtcaggagtactgtcttccccaccctcctgctcagcagttctgctaggagccccctccttcaagcgccccctcacctgagtccaccccacagggcaattcaggacaggatctagggagggccaggaggggagccctggatctgttgggaggagaatcctgcatgtgggagaaggagccaggtgctgatccaagggcctcaagatattccccctttggggctatcacactgcctgagattactccattataaatgtccctatattaatatggcattgacactaaagaatgggggtggagcagcatggcagagggaacggatttggacttgagggtctcatagtcttgagttcctatgagctctgcaacttggactagaggcctgccctctctgagcctcagtttgcttttgtgttaaatagacaccttccctcctctggatgccatcacccaggtctcttcaacaatgcccagggttctggcctagggagctgttgggagggtggtgggacagctttgggcattgtgatgcaggtgagcatctgatacaagcaggtgcacgttatatagagcacctggcacatagtaggtgcaccttatgtagagcacctggcacacagtaggtgtactttatgtggcgtacctagcacatagtaggtacactttatgcggcatacctggcacacagtaggtgctctttatgtagcatatctggcacacaataaggcacactttatatagtgtacctggcacacagtgtgtgtgctttatgtcaagtatgttgcaccgagtagttttactttatgtaggggacctaacacacgggagaagcattttatgtggaacatctggcacacagtaggtgtgctttatttagagcacctggcacacagcaagcatggtttatataaagggccagagactcaagatacaggttttgtgaagggctcccagcatacagtagacactctttatgttgagcacctggcacacagtaggtgcactatatgtagaatagccagcacacagtagacaagatttatgtagattacttgatgcagagtaggtgcgctttctgtgggtcaccaggtacatagtagacatgctcaatgtggagcacctgacacacagtaggtatgctttatatacagcacatggcacagagtaggcacgctttatatgaagtactctgcataaagtaagcttacattatgtacagcatgctgcacacagtaggtgagctttatgtggcatacctggcacatagtagacagaatttatgtagagtatctgatacacagtaagtgcactttatatagtgagactggcacacagtaggtgcacacagtagtgctttccgtacagtctttcgcatggagtagagacaggcacacagcagctcaagtgctagttgtcatccccttcccttcagtccctctttttggagctcccttttcttaggagccttcctccgtcaccctctaaggcctcatctgacatcccatttcccagatgggaagcctgagcccaggatggccacactgcccacagtcagagaaaggacagggcagaacaaggactccactcaggatccccttgctctgccctcccctgcctggaccccgtcagctcaaggcccctctcagcctcatcccctgtgcttccgctctgtcctcctaagctgagcccagcttctaggtttgctcctccagctgggctctttatccccagaatctgacgaaggtaatcctcagcggggttggggctggattctttcttcctgcttcaagcagtcaggcctcaactcaggccctgggctgccaggaggcaggacttgaactcttgccaggctgtgaagccagagatgagaggcttctgtctctgaatctcctaagtctgcaccaagatgtagtgcctgacatcctccccgcccatgtttggagaggagcccagatgatctgggacaagggttggcctggcccagctcagctggctgccaactgtcatgataagtatatgcttttatctgaacacccttgtcttggaagggcagggtggaggtaaacttggggttcagagtcccctctaaccaccctccaacttcccctgcaaactcccaagaaggtactgagacctgagaattcagtgctcgtgctggggcaccctgagctgcacccagtgggcccaaccccaggttttggytggctgcccaggcacggaagacacacccaggctgtggggattggctgcctcagcccagcccagcccagcccygcctcctacggccttccttagatcaggggccagggccaaagacctcccagcagaagaggagaasaggttgtgtgggacaagctgctcccgacagaagrtaccaggctgggggtggcagggctggaargtcctggcctgggatgaagaggggactgcctaaggctggggtggctccaagatgctggcatgggaaactgggggtttcctggtaamtggactcctagcaaactcccaaggattcaggtggggcccttctggactctaatcrgcccatctctttccstttctgtgtggttaccaggtyactggaggccacttrgttgttggttttggttgggactttctgsacttyagatctcagccctyrtttactcacccctgagccctccctgccctgcccccagcagttcctgacttcgcccctatmcactgtcccyggagctcttccctgggcctcaggtcctcaccctkcatcccctctgccctgcaggatgtcgctgctgagcctgccctggctgggcctcagacyggtggcaaygtccccatggctactcctgctgctggttgtgggctcctggctactcgcccgcatcctggcttggacctatgccttctataacaactgccgccggctccagtgtttcccacagcccccaaaacggaactggttttggggtcacctgggcctggtgagtgtgacagcaaaatgtgtctggggtctcagggtggatggacttccagaggagcaggaatggggctcagtgagctgggtattgatggtggctggggtctgcgaccccagagaagcaagggagatggctcactcattcctctgctcactcactcattcctgtgctcactcacttattcctctcctcactcactcctctacccactcactcactcctctacccactcactcattcctctcctcactcactcattcctctcctcactcactcattcctctcctcactcactcattcctctgcccactcactcattcctctcctcactcactcattcatctacccattcacttattcctctatccactcactttttgctctccccactcactcattcctctgctcactcactcattcctctccgcattcactcattcctctcctcactcgctcattcttctcctcacttgctcattcctctatccactcactcattcctctcctcactcactcattcctctcctcactcttatttgtttgctcactcactcattcctctgctcactcattcctctcctcattcactcattcccctcatcactcactcattcctctgcccactcactcattcctctacccattcacttattcctctatccactcactttttgctctccccactcactcattcctctcctcactcactcattcctctcactcactcattcctctcctcactcactcattcctcttctcattcactgattcctctacccactgactcattcctttcctcattcattcattcctctgcagttccatgccaaacctttctcacctccctgtcctcccacctcagcctgcttggatcctttccctgcctgtcttccctaccatagtgcccctcccagaggctcctgtatggttgtggggtgcacagagcagggctctcctggcattcccaccttctccactgctggacttgaagccttctgagccccgatagacaggctgctccctgcatggcccatttgcttgtatctgcccatctctgggctgctgctttcctgcaggaattatctctgacttccttccccacggagggacacagctggaccagaagagaagtgcaggcagtctcccacaccctctccttccagggacaacgtgctcttccctagtaagatgtcccaatgagccctgtagcccaacctggatataatttggccactcccttcccctttcagaagccgtccttggcactcccaaaccttgccctcttacttggacttgccctcccctttgggggacgtggcctccgtctgctcactcataaatggcaggattgatcagcatgtccacaggtgcacaggaggcactagcacagaacctggcataagtgaggctctcctaggtgggagctgccatcctgatggacattagagtcacctctgctcccctggaggctgctgagaatggagggccctcagcatgcaggccctttgtctgtgggaggaaycagtgcccatgtggaccaaccaggacacaaaaggatatggcaaccagctctagggatatgtcctgaggccacactgcygcccacaaacctccttccatggggaccttcccatatagcaatccccagattgaaatcaatccataatgagaaaacacatcctcttgagcagacagcttgtcttctctctctgctttggtatttagccttggatcttggggacagctccaagagagaaggagcagaagtcagcagaaaccccctgcagctgctgagaatccagacacgctgctcactgcagaggctgcaccacatcyggcggctgcgaggggacttgctgtggctccttctagggaggtgcattagtcagggttctccctagaaacggaatctccttagaaacagatagggtgtttcttcttatctctaatgcatgtatgtatggagacagaaagagatagagagataagaatttattatgggaattggataatgtgatgatggaggccaagaagtcccatgatatatcatctgcaagccagaaaccagggacactggtggtgtaaattcagcctgagtccagaaaggcctgagtccctggagttctgagggcaggagaagacagatrtcccagcwgcagaagagagagcaagttcttcctttcctctgccttttgtcctgttcatgccctcaatggattggatggggtctggcgtctcagggtgggtggacttccagaggggtgggacttccagtaggggttcagggagctgtgtattgatggtggctggggtctgggaacccagagaaccaagggagacggctcactcattcctctcctcacttactcattcctgtgcccattcactcattcctctcctcactcactcattccaataccaactcactcattcctctcctcattcactcattccaatacccactcactcattcctctcctcactcactcattccaatacccactcactcattcctctcctcactcactcattccaatacccactcactcattcctctcctcactcactcattcctctcctcactcactcattcctctcctcactcactcattcctgtgcccattcactcattcctctgctcactcactcattccaataccaactcactcattcctctcctcactcactcattcctctcctcattcagtcattcctgtcctcactcactcattcctctcctcactcactcattcctctcctcactcactcattcctctcctcactcactcattcctctgcccactcactcattcctctcctcactcactcattcctctcctcactcactcattcctctcctcactcattcccctcctcccattcctttacccactcactcattcctctcctcactcactcattcctctacccacacactcattcctttcttcactcactcgttcatctacccactcactcattcttctcctcactcactcattcctctcctcactcactcgttcctctcctcactcactcattcctctcctcactcactcattcctttacccacacactcattcctctcctcactcactcgttcatctacccactcaaccattcctcttctcacgtactcattcctctacccacacactcattcctctcctcactcactcattcctctacccatgcattcattcctctcctcattcattccttcctctcctcactcactcattcttctgctcactcaatcattccttcctctcctcactcactcattcttctgctcactcactgattcctctacgcatgcactcattcctctcctcactcattccttcctctcctcactaactcatttttctgctcgctcactcattcctctgctcactctcattcctctcctcactcactcattcctctcttcactcactcattcctctcctcactcactcattcctctacccatgcactcattcctctcctcactcactcattcctctgctcactcactcattcctctcctcactcattccttcctctcctcactcactcattcctctgctcactcactcatttctctcctcactcactcattcctctcctcactcactcattcctcttcctactcactcattcctctcctcactcactccttcctctcctcactcactcattcctctcctcactcactcattcctttcctactcactcattcctctgcactactatttccatcctgtttaccttcaaatgctaatctcttctcaaacaccctcacagacacacacagcaataatgtttgactggctatctggrcatcccttagcccagtctagtggacacctaaaattaaacatcacaggaagtgacagcccttgacttgctttcagatcactcctacagaggagggcttgaagractcgacccagatgtcggccacctattcccagggctttacgrtatggctgggtcccatcatccccttcatcgttttatgccaccctgacaccatccggtctatcaccaatgcctcaggtacccatgcagagcttgtggtggtgggtgccagrccaagcytctgtgtggtctctgcagtacccasgtccctccttgagtrctcgygcccctcaytgagrcttccwtctcaatgtcttctccctccattgccatctgctccctgtcttggtgttctgggcaccactggggctccaagaggcctcaattcagggcsctttctggaaggaacccccatgcttaaggacacgggtctagacagagacatttccagcttcatggggtcaggaatgggcaagakagakatgggtatgacaacacagagaactgggtgtctgctggggcaggctggaatgtttcctggaggaagagttgttggagctatgtctagaccaataagtaggattttttaagtgtggggcaggatgatgcagtgggcatcattggtatttggrgtcccagccagtcctkgcaccagccttgcccatcyctcagtccaaagcggtaggaggatttgtggctggtggagaatctgggctgctatttatgtgacatccacctatgatgggtcagttccttctgcctcatcctatcactcatccaccctaagtttcctgctctcctcctatgggcttcaggattctccaataggagaacccacaccagctgcttgayctccccttgctctctgctcttctcatccttggacacaccaggctgagctagggaagtggcagcatcccacaaaatctatggctctgacccccaaatccttagtgactctgtgcaggtcaccagctctctggctgctgaggtctctttcagttgtgagtgatggaaactcaacttyrtgtgctctaagcaaataaagagartcaaaggagtgtaaakttcagggagggtggtcttcaggcatggctgaatccaggtgtcaatgaacattatcaggratctgtctccttttcttaatttcaccatttctctgcatcactttttcttttaaggcagccgttctcttatctgtcaaccatgggtcctagcagctcagttcttgtcmgaaagctcaccttwcccccaggggtcccataaatascctatagtttcaatattatacctggttatatcttttctgtttaacctgggatcatatggagaagtcatcatgtgtgtggctcagctgtggtcgaggacacttggggcatgtcagagactttctggttcttctctgacatgtgatttgaaattgtcttttctcctccttgtcatctcttggccatgtttgtagcttgtccaaggtctgggagctagggtctctttggaattgtcagagttattattttagtctccctragccaggtttcggaatccattctaatcacgcttgaagaaaactcttggttccacctgggacatgtcysggacatttaagaaatcacatttaaaccctatctggggcctgtctgtggggtacacagaggtcatgtcagactatctcaggtccatgtcagragatgacagagagtgctrtagcagacagggtgtccgaggtcctttraaggtattttgtagagtgtggagctgtgttcagttgttgcagaacatgttgggatatataggagccatgtcaaggcgtgctggggtgtgctatgacctgttaggttgtgtcatagctttactgtgctgttgcagcctgggctggtccttcttcctctatcctcccttcgtcctttgcccttggcccccttcctgctatgctgggcatggagtggggaaagtgctggtaggcagccttgccctatacctgaagttcctctcttgccctctacatggcccctgatggtcctcrttcatgtcagctgccattgcacycaaggataatctcttcatcaggttcctgaagccctggctgggtgagtacctgcaggtgaaaggggwtgggracaaccttgcgggrakggtaggggaagtgctgctcttgcccaytgtccttggctgccctactaggagaagggatmctgctgagtggcggtgacaagtggagccgccaccgtcggatgctgacgcccgccttccatttcaacatcctgaagtcctatataacgatcttcaacaagagtgcaaacatcatgcttgtgagtcccttgaagtctgggtcccagatggagtcttggggtggagggaccatggacacatctggtctggaattttggctcttctgggtggcactgggccattgctcttcctctctgagccttggtttcctcatctgtaaaatggggatgataatccctacttgaaaggtcatttacttggcacacagtaggttctcagaaggtgtcagtttctgtgtttttctcacagaatccctgtaaactcaagagagtaaaaatgaagattgtgtagtagtcattgctgattacaaaccacttcagaactcattggcttagagccataagggtttacaatcgctaacgagtctgtgagacagctggccagttcttctggatgtggaagggatcactcttggcacaagagcagctgtgggttggggggcagctttgctgatcctggctcagttcattcacgtttggggcttcagtaccttcagactsatctgggatgggctcagctgtgacacctggactttcccccatgtgattctctgcctccagaaggcaccctgttgttcacatggcagagactgggctccgagaaactgagaggaggctgcaatgtctgtggacattgtctctgcaatacttcaaagttcaaccaggtttgagtctattagagttattacatcatcatttcaccacattgtactggccaaagaaagtcgaaagtcaaaagtccagtacagactcaaaggggtgtaaaatagaaygcatctcttaatgggagttgctgaaaaattactgtggaaagggtaygaatacagggagaagtgaagaattgggggtcaggattttgtgaagtgtctaggatktkttttaaatatgcaaactgataagttagcttgttactgtctcatgcattctaacagattcctgggtcagagacaaagggtagttgattactcatggcacaataagcaacatgtacttcttgttggtttgtatcctttttctgagtcaacctaaattccatgggggtgacactggtgggcctctacattagcctgctcatgcagtacattgcatgacatacaatgggcattaggcttarggaatctactttaatagtggcagaaacaagcctgatattggtccaggaggagtcattgccttatctctccaggtggttatctgcaaatacaactctgagaaatggctcaggtaagaacatcacrgtcttgcattggtggcatacgcagcaaggatgctcagggctgatgaagaagtgcctcttccaacacagggatatttttgaaatgaatttattacaatggagatgaataaagcaaacatttactcatcatatgcctgagaaaatgtcatgtcccaatgccaggatataagttgtctaagttaattttaataatcctgtgaggttatggttatttttgtcctattgcagatgatgaactgagggccagagagattagggagctggacagagttcaaccagccaggaagtgagctaggactggtggagcagagattctatcctggtttatctggccccaaagcagatcaccttgacygttattgaatatttgacaggtggracctagaggagggcaatakgttgaccaagggcacayagagcmtaggagasagagctgagacttgaatgcagktctcttgactccaagccatgggtcttcatctcctatactaacagtttctgctcgcatcccagtctrgtccttgctggcaatgggttcctggggcagaggaccaggaggctggttgtgggggagtccatcctgatgtttgggactggggaggggcacaaaggaggcagggcccagctctagctctcttccyttctctggccaggacaagtggcagcacctggcctcagagggcagcagtygtctggacatgtttgagcacatcagcctcatgaccttggacagtctacagaaatgcatcttcagctttgacagccattgtcaggagtgagttccttcctagggcctgggatatgaatccatggaccaaagggagwaagttggrgagggaggaatgagcaaagtaaccagaagtacctttygggaggatttgtatcatagctgtgctttgaaggtcgaggaagaggagaaagtgctgtctttccaggtagaaatatgtgtgtaaaagcaagaaggttaggatgagccaagcatgtgcaagagacagtagaaatgaggttgtggaagtaggggctagatattaagggcactgaaaatcaggaaaagtggtatgaagtttatcaagacatttccagagaccttttgtagtttcagctgatgatggatgtgataagagctgagctgtgtgggaaactgatagcccaccaccacgcccagctaatttctgtattttcagtagagagggggttcaccatgttgtccaggctggtctcaaattcctgacctcaggtgatctgccctctttggcctcagaaaatgttgggattacaggcatgagccactgtgcccagctgcttcttctttcttacagggtgagagggagagagagagaggagagagagagrgacagagagacagagagagagagagagaaagagagagagagttggttatgctgggggctggagcagggctgaactggaagaggatgaagtctgagttgtgtggacagttttggtaaggaaaatgatcagtactgcatactggatgggagacagaggagagaagcatggtgtccaagctatactctaggtgcctaggtgcatggagacagctctctcagagataggatgcagggagagaagacastctagagagtcagtctcatgactgatacccaccatgtatctctaggaccatctatttctagatactcagtttcctgatgggaggtagctcctggctgctggtgggaggtgttcctggggctttgcatacgttacattgttgcctccctttctgcccttgctctgcaggaggcccagtgaatatattgccaccatcttggagctcagtgcccttgtagagaaaagaagccagcatatcctccagyacatggactttctgtattacctctcccatgaygggyggcgcttccacagggcctgccgcctggtgcatgacttcacagacgctgtcatccgggagcggcgtcgcaccctccccactcagggtattgatgattttttcaaagacaaagccaagtccaagactttggatttcattgatgtgcttctgctgagcaaggtaggtttctctatgatctgartttaggtgagagaatagagcttcatgtcaaatgtcaggtgaaataaattggttttgatccaaagggcactgggagccatggaagatgcttgagaaagggaaggtcacagataggttttagagatgactttaytgcatgcagcccacagggcactgctaattctgaaactgtgargagcatgatattttattcaacttayaagttagtgtgttagtctttcacatttttatgtgtatctatatgtctaygtctttgtctatgtctgtatctatgataaaagatgcaccaarcccctggatcacagcagcccattaattatttacagcagtaacagcaggtggagtaggatggtagtgctggctccccattcctagggcaacacaatgtttttacctgtaaatgcacaagaatttgcaccaaggagaggggcccccacgttatgagtattatagcttatataggacagctagctcatatgctccttctttattayagggtgaaagttagagacagagaaagagagagagagagaatgctttgttctggmgtataaactacccctctcctgtgagatggcaatttctagagttttataacccaaatatcttctggaaagataagattctctgggtttaccactctagaatgtcagcaaatatttttggagcaatacataatttctaacctccaaggcaaattgccattcaaatatcctgtaccccaggttgccagtatctttttctctgaaagtctgtattatgcagaaaaatgaaaatattcragaaccattgattcctgtcaccagggtccaaagaggaggcaaargatctgggggaagcccttggagttggggctttggtgatggtgaacaagagagatctagacgtgcagagtgcatttgagtttctggaagatcagagcttcagagattatctcargttagactccggagtctcagagatagtataatttgtgtgtgtgtgtgtgtgtgtgtgtgtgtgtgtgtgtgtgtgtcttgctttctcttcaggatgaagatgggaaggcattgtcagatgaggatataagagcagaggctgacaccttcatgtttgsagrtgagggtcccagtgtgggactacagtggagacagaggtccctccatctcargatccgggtgggtggaccctggatcactccattctgyccatcttccccctccctccatcctcctgagggcctcaatatctgggcgctgtccaccctmnggtgcygaagccaagcttacctggctgctcctcaggccatgacaccacggccagtggcctctcctgggtcctgtacaaccttgcgaggcacccagartaccaggagcgctgccgacaggaggtgcaagagcttctgaaggaccgcgatcctaaagagattgaatggtgagtgcaagttcttctggcctgttcctgagcccatcattggttctgctccccaagtgaggaggggtggaggagttgttttgtggattcttccactattgcttagtgggtataaaagcagaggaccacaggcagggcttgataccaagcctggctgtcaggggaaaagttgcaggcctttaggaccgaaagacccgggctgctaagagaattggtgacaatgtgtgaggacagataatgctactttgcacatgttcagcaaatgaacttcccctccactctgtttctgttctcccagaaatatcagttttttcgaaaatcctcacttcttgaatgtttgctcaggtggggagggrgaagttgtttttgtcaattcttccattattgcttagtagtactaggagcagagcacagaggcagaacttggtatccarcctggctagcaggggaaagttttcagacttttgggacagagagtcctagccygctgagagaactarggacaatatatgaaggcagacgatgacatctagacatgttcagtcaatgaattttcccttcactcctttcttgtttwctctgaattatcatatttttttcaaacatctttacttcctgaatgtttrctcttctgttccctaattcctaccctccrgtccagtccagggagtcctaagggagacctgggggtaaaagtcatctatcttttgtctagaacacctgcatcgttcatccattcagtcttcattcagcaaactcttccacatgcctttccattgccagttctgttcccagcacctttctgtgctctggagacctggaaagaaccctgcctatggatgtgttttccaggtactcccagcctagtaggaacagtcccccacaagacattcccagtccacataggcaaggatggagttgagagcaagagaagcatggctgggagtacagaaagtgtgatagaaagtgtttcaagccagatctggtggctgtcgcttgtgataccaagtaccgaggaggctgaagtgggakaatcacttgaggtcaggyttaagatcaacctgggcaatatagaaagaacccatttctaaaaaagtaaaaaaccaaaataataaagtgcctcaactgaaaccctgaatggtgatcagtaggtgtttggatgcagtagtgccctaggtcaaaaagaragyctgggcaaaaatgcaaaaagagggagcaggagagagggagaagagggaaagagaggtttgtgtgtcagggaaggagatggttataaagggaggragaagtaagasggaggaaaagtgagggagagcaagataaagagaggagggaagacagaaggagacagagagagaatgagagagaaaggaactgagttgtgatgagataataactatggwagtgaaagcagagtctggctgtggaaaatatgggaaaatggtaatggcttccattttaacccaaaggcaatgggragccataacaagtggttgagcaggggaggggcargtcatatctgggcrccagaaagatcttttcagagctactgtggagagaggaccagctgtagaatgaagtcccagtgaagacattctgggacctgagccagggcagggsctggggatggagaggaggcaatggactggacatgtgttttggaggccgtgtcctcccgtccaagcctttgctcagcacagcagtcctaaaaggtggcaacactttttatgcttttaaaaaccaagatatcaagtaatactgtgcactttgtaaacaaaaaaaagtgtctaaaacatttataaaaatgagctttcctcatgcctgtaatcccagcactttggaaggccgaggcgggcggatcacgaggtcaggagattgagaccatcctggctaacacggtgaaaccccgtctctactaaaagtataaaaaattagccgggcgtgatggcaggtgcctgtagtcccagctactctggaggctgaggcaggagaatggcgtgaacccgggaggcggagcttgcagtgagctgagatggcaccattgcactccagcctgggcaacagagtgagactctttctcaaaaaaaaaaaaacagagcttccttcttaactgtcaccctagtagtttctaccatcaatggttttgtgtgtccctccagaagatgsctatcttgatgcccactttataagaacacagacttcttctatacaaataagagtgtataaaatagacacagtactttttcccaagatggtgggttggaggcaatgtcagtgtgcctctcccatgtggaaggacagaatagtgtgtagagattcacagtgtragctttcttttcccaagaaacaacacagggacttaacaggaaaaccagaagaatccacaracccttcaaaagaagctacaggctgcattctactctgtgagacaggtgaaaaactgtgaatcctcagagtaagagggggagagactgcttccwrggtacacatcttcactggggaatctgaaaattcagaccacaggagaaggccttaactctatccagggcttgaactgatttagggagtggtaagaaatataaaagtagaagcagcagcaggaagtcccttgcaggcattcacaatctccagcatggactgagggaagccattccttattgtatctcacaggggaccttggggawgtcagacaactagctcaggygaggtcacaggttgaacgaaatgcccaaatgaatttcttgatataacctcgagtggggatgaactcccttgaccagaacccgggaggcaagcaggaagtgtgctgcagacaggagttcagaagctgggtgcctggccttggacagggacaaaaaaggrcatggcctgaaagcattgctatttctgtgggaaaagcttatggcctggggcagggctgagttctgtgcacagactgcctggatctaaatccagtgctatgagtggaacactgcatgtgtgagacccaccttgtgccaactgcatgggagctagatgaggcttactgccacctgctactctccactcccttgtcaaactcttctgtgaggcagaggcagttatactcacctctggawcattaccccagtgacctmagaaccrccctctgactctcacagggcaaaacaaacaaacaaaaaaacagttgcaaaaaaaaaaaatacctaggaatatacttaaccaaggaggttaaagctctctacaaggagaactacaaaacagtgctggacaaaaccatagatgacacaaaccaatgaaaacacatcccatgttcatggattggaagaatcaatattgtgaaaatgatcatagtgcaaagcaatctacagatttaacrcaatgcctatgaaaataccttcatcatttttcacacaactgggaaaagcaattctaaaattcatatggaaccaaaacagagcctgtgtagtcaaagcaataccaagcaaaaagaaaaaatttggaggcatcacattaccggacttcaaattacattacaaggctacaattaccaaaacagcatggtactggtataaaagtaggcrtttagatgaatggaacagaaaggaggacccagaaataaagccaaatacttacagccaactgatctttgacaaagcatacaaaaacataaattggggaaagacaccctattcaataaatggtgctgggaaaactggacagtcacatgtagaaaaatgaaactgcatccccatctctcaccttgtacaaaaatcaaaggcttaaatctaagacagaaaccataacaattttataagataacyttggaaaaactcttttggacattggcctaggcaaagaattcgtgaccaagaccacaaaagcaaatgcaacaaaaccaaaaataaatcagtggaacttaattaaactaaaaagcttctgcacaacaaaataataataataataatagccgacttaacagacaacctacagagtgggggaaaatatttgcaaactatgcatctgacaaagggctagtatccagaatctacaaggaactcaaacaactcagcaaggaaaacaaacaaacaaacaattagttccatcaaaaagtgggcaaagggcatgaacagataattctcaaaagaagatacacaaacagccacgaaacatatgaaaaaatgctcaacatcactaatcatcagggatatgcaaattaaaaccacaatgagataccatcttgtttctacaagaatggccataattaaaaagtcaaaaaacaatagatgtatgttgtggatgtattgaaaagtgaatgctcatacactgctatgaaaattaacataacctctgtggaaaacgataaggatattccttagcgaactaaaagtaaatctaccattccatccagcaatctcactactaggtatccacccaaaggaaaagtgattatatgaaaaagacacatgcacatgcatgcttatagtagcacaattcacaattgtaaaggtacggaaccaacctaactgcccattgaccaatgagtggataaagaaaatgtggcatatatacacaatggaatactactcagtcataaaaaggaatgaaataatgtcttttgccgcaacttggatggagctggaggccattattctaagtgaagtaactcaagaatagaaaaccaaataccayatattttcacctataagtgggagctaagctgtgaggacacaaatacatasagagtgatataatgagctttggagactcggagagcaaggttgggagccgggtaagggagaaaagactgcatattggggacagtatacactgcatgggtgatgggtgcacwaaaacctcagaattcaccactatagaaatcatccatgtaaccaaaccacttatatcccaaatgctattgaaataaaaggaartaaagaagagacagatctgcacattaacaatatatctttgggagcttttctttttctaaaaatatgagttttggaaaattagttcgtttttatttttaattggcaaattttaattatatatgtttatggggtgcaatgtgatattatgatatatgtatacaacgtggaatgattaagtcaatttaataaacatacccgtcatctcatatactcatcatttttgtggtgagaatatttgaaatttgctctcttagcaattttgagaaatttattattattaactgtagtcaccatgcatgcaatagatctcaaaacttattccttctaacggaaacttgtaccctttgaccaatgtctttccattctttcttcctcccttctctggtaaccaccattctcttcttggtttctatgatttctgtgttaattatttcagatctcacagktaattaaggttatgtgctgtttgtctctttgtgcctggctcatttcacttagcataatgtcctttaggttcttgcagattgccacagatgaaagaattttcttctgttttaaggctgactagcattccattttgtatatatacaccacacggaaaatgagttttgaattacaaaagcaatgatgagaacagtttcttcttgcactcaatgaggcatcacagatagacaagggttattcttgacattcctgctatcccacctaatatcctccctttctccaagggggcctgtagagatacttatttgtcatctatctgtctgtctgtttacatctatctacatatctttctatcatcgatctcttcttatattccttatattttttgtcctatggtatttacatatatggacatttgggaacatgtttttttccactcaatactgtgtctgacagatattttttctgagtgctgaatagcattccatgttttatttggcccatccctttgttgaagacacttgcgtaaacatttccaatcattggaggtatggccaatttgcattccagagtctctgtactgatttagcttctggtctgcattgtgtgacaggactagtgatcctttttttctccttttgtgtagctgtatastattccattgtgtggatgtttatctaaacatctccccatccatgtatatttggcttgtttcatccttttgctaaattaaacttgtgcaatcggyatgtgtgtacagtgagcattgctcatatgtataarcatcrctgcaggacaaattcccaaaagtgcaattgttgaaycaaagaccatttgcattctacagttgtaataatgattgcaaatccatctctatattaggtgagtttgatggcactagctttcccacaaatttgccaatagtattattgtattattaaatttaaawtttttgtccatcttcatatttcatcttttaatgagcattttcttaaataagagtgagaaagaacatcctttgcccaagttgataagccatttattttctttctatgggagtggtcatctgatattttctgctgtttttctttgggttcttttttcttatttacttataagaatgtgtatcacaattaatgttttttttttctgtttttttgttgcaaaagattgccttttgacttttttggggggtgcttttggttaattacatttgttcgtattttcttttgtaccacactacccagctatttcccagagttttgtggggcttcctttggcagatgggaagtttccacttattcacatgtccgtctctgacctttttagtcttttgaatgcatccgtttttatggcattgccagactattttttmttactgtgacttttcttttcttttttctttttttgagatggagtctagctttgtcgcccaggctggagtgcagtggtgcgatctcagcttactgaaacctcctgcctctctggttcaagctattctcctgcctcagcctcccgagtaactgggactacaggcaccctccaccacgcctggctaattcttgttttaggtagagatgaggtttcaccacattggtcaggctggtctcaaactcttgacctcaagtgatccacccacctcggcctcccaatactctgactttctaatgggttttaatatctggcagagtggctttttttgttgttaaatcaacccytgcaaacatttrttgtgtgataaagtgtatgttttatttggattgagggaaatttataatgaaatacagagatttcatgtttctttttaagtttaatccaggtattttatattattatgactagtatcttttcttttattatcttttcatttgatggttatttctatatggtaaaactaatgatttatgcatataaattctatgcccartgaacatagtatatgctaaagatggtatctgtatcaagagaaaaaatatagataattaagtaaaagctcttggggcaactggaaagccttctggaaaaaaggcaactgaacctkgttctcatatcttatgacaagataatgttcagattaatcatttttttctaaaagagtcctaaaagctctagaaggaaccatgagaaaattatttcatagcgccagagtagggataaccttattttgacgtaagtcccaggggctatgaaaaagtgataaactgttaaatgagagaaaagatacacgccagccacggtggttcatgactgtaatcccagtactttgtgaggccaaggtgggcagatcacttgagatcaggagttcaagaccagccttgccaaattggggaaactccatctctactaaaaataaaaaaaaaaaattagctggctgttgtggtgaatgcctgtagtcccagctacttgggaggctgaggcagtagaatcacttgaaccagggaggtggaggttgcagtgagacaagattgtgtcactgcactccagcctgagcaacagagactccattccctccccccrtcaaaaaagatacagaatagtgtctacagtagatggtgtgctcctatataattttttaagatgcttaaaatcagcccagaaagcatacattaaaaaaataataacctggcaacgtgtggggagaagtaaatggcattgggccataggagtgaattatgttttatagttttcaaattctgaaccagataattgtagacggtatgaaaattttaaatagccactgcaaaagaagaaagattaagcagagaattcagctcctttgctygatcttaaatgtttataaacgttttccagtggggcctctagtgttttctaagtataaaatcactatctgccaaaatgatacatttactaccacatttcaaattgcctgactctcgtgtttttttggctgcataaatgtcttcttttgagaagtgtctgttcatgtccttcgcccactttttgatggagttgtttgtttttttcttgtaaatttgtttgacttcattgtagattctggatattagccctctgtcagatgagtaggttgcgaaaattttctcccattttgtacgttgcctgttcactctgatggtagtttcttttgctgtgcagaagctctttagtttaattagatcccatttgtcaattttggcttttgttgccattgcttttggtgttttagacatgaagtccttgcccatgtctatgtcttgaatggtaatgcctcggttttcttctagggtttttatggttttaggtctaacgtttaggtctttattccatcttgaattaatttttgtataaggtgtaaggaagggatctagtttcagctttctacatatggctagccagttttcccagcaccatttattaaatagggaatcctttccccattgcttgtttttctcaggtttgtcaaagatcagatagttgtagacatgtggcattaactctgagggctctgttctgttccattgatctagatctctgttttggtaccagtaccatgctgttttggttactgtagccttgtagtatagtttgaagtcaagtagcatgatgcctccagctttgttcttttggcttaggattgacttggcgatgcgggctcctttttggtgccatatgaactttagttttttccaattctgtgaagaaagtcattggtagcttgatggggatggcattgaatctataaattatcttgggcagtatggccattttcatgatattgattcttcctacccatgagcatggaatgttcttccctttctttgcaccctcttttatttcattgagcagtggtttgtagttctccttgaagaggtccttcacgtcccttgtaagttggattcctaggtattttcttctctttgaagcagttgtgaatgggagttcactcatgatttggctctctgtttgtctgttattggtgtataagaatgcttgtgatttttgtccattgattttgtatcctgagactttgctgaagttgcttatcagcttaaggagattttgggctgagacaatggggttttctagatatacaatcatgtcatctgcaaacagggacaatttgacrtcttcttttcctaattgaataacctttatttccttctcctgcctaattgccctggccagaacttccaacactttatgcagccaaaaaacacatgaaaaaatgctcaccatcactggccatcaaagaaatgcaaatcaaaaccacaatgagataccatctcacaccagttagaatggcaatcattaaaaagtcaggaaacaacaggtgctggacaggatgtggagaaataggaacacttttacactgttggtgggactgtaaactagttcaaccatggtggaagtcagtgtggcgattcctcagggatctagaactagaaataccatttgacccagccatcccattactgggtatatacccaaaggactataaatcatgcggctataaagacacatgcacatgtatgtttattgcggcactattcacaacagcaaagacttggaaccaacccaaatgtccaacaatgatagactggattaagaaaatgtggcacatatacaccatggaatactatgcagccataaaaaatgatgagttcatgtcccttgtagggacatggatgaaattggaaatcatcattctcagtaaactatcgcaaagacaaaaaaaccaaacaccgcatgttctcactcataggtgggaattgaacaatgagaacacatggacacaggaaggggaacatcacactctggggactgttgtggggtggggggagggggaagggacagcattaggagatataactaatgctaaatgatgagttaatgggtgcagcacaccagcatggcacatgtatacatatgtaactaacctgcacattgtgcacatgtaccctaaaagtataataataataaaaaaaaaaaaacaaattgcatgactctccttttttcccttgcctaattgcacttgctggtatctctagcatcacgctaaataagagcaaaacattggatctgggtattttgtttgttattcatttgcatttgagtttgctttcttgccatagacaatatttatttttatgtgagtttgttaattttttaccgctggcttctgggtgttttcctcagagtatttatttttatctatttggctaaattttctctggtacttttctaattctcwgcttctctaattgttttctgctttttaaaattctcaaatgtttgatccccgtggagtttattttgtgatagggagaaaagntctcatttgcaaatagaaaaggtggagagttgtgtntttgttcccttgataatgactggggctggggtgtttccttagggacgacctggcccagctgcccttcctgaccatgtgcgtgaaggagagcctgaggttacatcccccagctcccttcatctcccgatgctgcacccaggacrttgttctcccagatggccgagtcatccccaaaggtgcccacagcctcagggggagaagcctcccgggtaggaagatggttccctcaggggatccttgtcctgactgcccctttctctcccacaggcattacctgcctcatcgatattataggggtccatcacaacccaactgtgtggccggatcctgaggtgctgccttccccattcaccaccacyacccccatcctctacttttgtgtgtgtgtgtgtgaattccaaggttcctagtggagggggcagggttttgatgaggaaaatccaacatcacctcrccccaaaacacacacaastgtctctccaaggctgctggacataggaaatcccackggcaaaccttctttgtytcacctgcaggtctacgaccccttccgctttgacccagagaacagcaaggggaggtcacctctggcttttattccyttctccgcagggcccaggtaagagcrccctgtgtctgaggcagggatgggatgatgggtgcgggagttaaaaaaagggggacgttgcagatggtcccagttccagctctccttccctccattccttcacagtttatgggaaaacgtccatagaatggggatgagtaggtcctagaggggtccgnggagtgctcaaaatccccttctccatctgctggtctgagctgggagctggagtcaggcccagtctccgggacatacaagcccacatgggagtcccaggcacgcttagtctttctctctctctctcaggctgagctgggtgcagttgggggtcccaggccaggttcctgggttgatgggacccaaatgcgggtcttgggcacagtcacagtccccactcccgcctgcaggarctgcatcgggcaggcgttcgccatggcggagatgaaagtggtcctggcgytgatgctgctgcacttccggttcctgccagaccacactgagccccgcaggaagctggaaytgatcatgcgcgccgagggcgggctttggctgcgggtggagcccctgaatgtargcttgcagtgactttctgacccatccacctgtttttttgcagattgtcatgaataaaacggtgctgtcacctctgcctgggcctcactgacagcctgcarggggctcttggggactgggaggcttcagggaaggggcctaacctgggtgggttaggcgggatgttttccctgaaaccaagaacctgactgcctctttggctgagcatagggcctccatgcttatagcagggtctctcagagcccaagtatggactttatcctgtggacaatgtggagccatgggaggtttttgagcaggagagggaccaggattaagaacggatttaagaggtacgactgaggctaagtgagaagcaaccataggggcagatcctttcttttggtctgggagtgtcccaagaccgaggtccctggccagttcagaacacaaggatagaagggtgcagcttataccctggcaggctctcaggagttctgtttcctttcttgctaacgtcccaccctatgtctcccccttccagttgatcgcttttgtgacccctttccctaacttcaggcagctcctatttttcctcttttgagccctctgactctgcccaggctgcttgtccatcagctgctatctgaatcctccccctactctcttctgctatgtgccaggcactctcacaagtgtcaggggttgggcacgtcttcaccctttcacctctagattcctccttcattcccatcactgacccatcttggggtggggtgcagtcaggaacatcctgtttgacccttgagattcaaagacagatgactggaaacagaacaccatcccaaaggtatgggatctggagccagactgttgggctgaagtctcatctttgctgtgtgacttgagtaagttaattcccctctatgcacttcagtttcctcaaacatataatgtgggcaacaacactacctaactcagggttgtcctgaggacaaaatgtggagaactcagaacttgttgcctggtgcatattggatgcttaataaatgtggccattattacctcctctctgagaaagtctggctaataaaccatgttgcctttcaagatagtttttttctaccacgactttaaagactgtcttggaacttacaggcaaaaattgtaatatttgtgctccttgaataatctcttgccttttagagggctgtgcatttaggaggcaattttttctaagactggttgcgggcacctgaaagtgcaaggtggtaggagaaggaaagaagcctcagttaatgttttaaaatgatgtcctgccacaaacattgacctctgttcatagcctaaggaattctgcaccgctgcaccctgcagacttgtcaaatcttctctccagctcatattcctcccttgttacactcagtcaccttgtccttgattcttatctccaaatacattatattttcttgtttagggccattgtacttccttggaactcttgtgaaagatcagttgcctatacttaacgtgggtctattttctgggatttgtattctggtccattgacctatttgtcttttactaataccacaacatcttgattactgtaactttacagtaagtcttgaagtgggatattgtcattcctcaaacaatattccacttcttcaacagtgtgttgtctattctaggtcttttgtctctccatgtgcattttagagttagtttgttgatatccattaaaaaagctttcttaaatttttactgggactgcattgaatctacagaattacttgggaagaactgacatcctgagaatattttctgccttataagaaatgctcaaggaagtcctgcatctggaagtgaaaataggataactaccatcatgacaacatacaaaagtataaaattatctggcagaaactggaaaaaacttcacagtgtgaacctttacacactattttgtcttccaagtggaagaagcatactaacaatgccaccaatccaccatctcaggaaaaaaattaataaactgtcttttctgtaatccccttttcaatgggggtgaggtgttatttcactgtggttttgatttacgttttttgagaaccaaaagcaaacaggagtagctatatttatatcaggtaaaatagactttaagttaaaatctgtaaaaagagacaaagatgtttattatataataataaagggatcaattcaactagaggaaataattgcaaatgttgtaaatatttacaatattatttacacccaatagtagagtacccagatatcgaaagcacacattattagatctaaagagagacatatactgtgatacaataatcactggggacttcagcaacccactgtcagcattggacagttcatctagactagcagtctccatcttttttggcaccagggacgagtttcacggaagacgattttcccatggacgaaggtaggggatggttttgggatgattcaagcacattacacttatcattagatcctcataaggagtgtgtaaactagacgcctcatgtttggagttcacagtagggttcacattcctatgagaattgaatgctgctgctgatctgcatccgatcagcagggcaagaggcggagctcacctttgcttgcttgcccaccactcacctcctgctgtgcagcctggttcctaacatgcatcggattggtattctatacatacatatattaattaatatatattataatatgtctttcctttttttggtgatcttttcagtgtctttcatcagtgttttatagttttccttgcagagatcttttgcccacttatttaaattaatttctatgcaatatatattactaagaaatagtataatacatatgtgtatatatattatatatatataacttagaaataaatttaacctactcagttaaatttatttctaagtggctgggcgctgtgtctcatgcctgtaatcccagcactttgggaggctgagccagttggatgacctgaggtcaggagttcaagaccagcctgaccaacatggtgaaaccctgtctctactaaaaatacaaaaattagctgggcgtggtggtgtgtgcctgtaatctaaactgcttaggaggctgaggcaggagaatcgcttgaacccgggaggcgaagatttcagtgagccgagatcgcaccattgtacttcagcctggcctagaaaagtgaaattccatctcaaaaaaaaatatttctaagtaatacagattactaagaaatagtatagtgtatatacatgacttaaaaataaaaataactaagcagatgaaagagctctgcaaggaaaactataaaatactgacaaaagaaactgaagaggtcacaaaaaaaaatagaaagacattccatgttggaaggaacattattccaacattagttggaggaactaatattgtgaaaatgactcarctaccaagaacattctacagatttaatgcaatctctgccaaaataccagtgacattctctagagaaatagaaaaaaacagattctaaaatttatatgatatcatagaacactacacagagttgaagcaatcctgagtgaaaagaagaaatctggaagaatcacactatctgacttcaaattatactacaaagctatagtaatcagaacagtatgatactggcataaagagagaccaatggaaaaagaccaatggaacagaacatagaacccagaaataaatccatgaatttacacccagctgaatttcaacaaagttgccaagaatattcaatggggaaaggacaatctcttcaataaatgatggtgaaagaactgaatgtgtacatgcagaaaatgaaacyagatgcttatctcttaccatattcaaaaatcaaaccaaaatggataaaagacttaaatgcaagacctgaaactatgaattactcgaagaaaacattggggaaatgcttaaggaaactgatacgggcaagaagttttttgataagaactcaacagcataggcaacaaaggtaaaatggtgaaatgggattaaatccaacaaaaaagcttcttcagagcaaagaaatcaatcaacaaagtgaagagacaacctacagaatgagaagaaaaatttgcacgttttcagtctgacaaaggattggtaatcagaccatatgaggaactcagacaactaatagcaaaggaaacccaaaaataattcgagtaaaaatgggcaaatgatctgaatagacattcctcaaaagaagacataccaataggtatatgaagagttgctcaacattactaaccatctgggaaatgggaatcaaaaccacagtgagataacatctcacccccattgaaatggggattatagaaaagacagtttatttatttttttcctgagatggtggattggagggattgttagcatgcttctcccacttggaagacaaaatagtgtgtaaagattcacactgtgaagttttttccaagaagtgacacaggaacttaacaggaaaactgaaagaaaccaccctttgaaagaagcatcaggctgcagcctacaccacgagccaggtggacaactgtaagtccccagagtgtgagagagggtaaagtgcctccaggatatacagtcccaccggggaacctggtaatccaggccacagggaaggtcttaatctttccttgtggcaggccaactgggtggctgggtcttaatccttctgagtactggagctgacttagtaagtggtgggagtatatgagaagtggcatcagggcaggcattcccagtctctggcattcccagtctccagcaggacaaagggaagccattcctgatcctacctcacaggggacctcatgggcgtctgccagctaacacaggtggtggtcacaggttgagagaaactcccaactgagattcacaatataatctcaagtagggataactcccccgtggtcagaccaagaggcaagtgggaagtgagctgcagcaaccagcacaggagcttggtgttcctgcttaatgggcaaacctggagaggtgtggcctgaaagctgcagatactggctcagcattggacttttgtgtccctgcttaatgggcaaacctggagaggtgtggcctgaaagctgcagatactggctcctcagggaaggcgtatggcctggggcacatttgaattctgagcacagactgcctggaacctagctagctgctgctagtggaacactgtgggtgcaagacctgtcttgccaagagtgtaggagctgggtgtggcttattgccacctgctactccccattccccatacagactcttctgtgaagcagaggcagctgtgctcctccctggacattattcctgcaaccagagaaccactctctgatccccagtggggctactgcttttgtccagaggtggagagccagagtgcggacttgcctgattgagctctcacttggctttgcccctccacctgccctgatatattaatacgtagggcagaaatttttgggagccctatggcccccccgcccggcccgccactgcctgagacgcgagagtacctcctctgggtaacataagacagacacaaattccactgctaccaccacagctggtgttattttgcaagcgccacctcctggctgtgggccaattgacagagtccattatagtatctgcttgcaagcacaataacagccagcaggaaggagaaaacttgtgcatgacctcagctatcactattgcctgcatccatctggttaatcaggaagttctgagtctgtccacatgaccagtttgttagtaccacagctggcatttgagaaagccaacacactaaggctacttataactgagcaatctcacagaatctacatcactccccttcttcccccatcagagctggggctggtaccactgctgggggttttgaggatccgttacttgattggccccttgcagatattctccagcaccagcataaattgtggcagccccactgggtggctagaccaagaggagccgcagccctcatagtagtctggctctctgagactcctacttctagggggaaggggagtgcaccgtatcaatgga

SEQ ID NO: 96156 - DNA, 22916 bp, Homo sapiens
  misc_feature (1)...(22916): n = A,T,C or G
catattctcaggtcacataaacacagcactctgtaacctggagtcagtccctcacttggtcagtgagtgggctgaagcacccactgggacagggtggctgagaaccaggacagggcctggtcaggaggggttgagggcagggcctgggaagtgagtgatgcaatgaggttgggcagtaccaccccccacccaaccacccactgcaggcctcccacatcatcgggtcactaaacaaatcccagagggcccagccccagctgttgcctggctttccagaaacagaactcggttgggaatcgctgctgcttggacaggtctgtccccagaaagccctgggcatggatggagtcctgtctaccctctggtttccactgacacatttacctaccaacattctgtccaagtctcctcttctgagccctcaccagaatcacccttaatggagagtcacagggagaagacgtccacccgcgcatgagaagacaggcctggaacagagccttcctgcacagcctcagaagggacccaccttgctgacaccttgatcttggactcatggcctccagtactgtgagacagtaacgttctgttgttgaaggtgcccagtctgtggtactgtaaaacagccctaggaaactaacacagcctgttagcccacagatggtggagagatggaatgctccatggagctccaggcttactgtctgcagcccccaaagtgtgctccgggacccttgggtgggtgtaggtatgcaaggtaatttggggtggttcaaggtgaagaatttcaattgacataataatgtatttatcttgctgggtaaatgagggatccccagctgttaggaaccaggctacacagcaggaggtgagcagccagccagtgagcaaagcttcatctgtagaaacagccacttcccatcccttgcattaccacgtgagctgtgcctcctctcagatgagcggtgccattatctcataggagcgtgaaccctactgtgaactgcgcatgccagggatctagattgcgtgctccttatgagaacctaatgcctgatgatctgtgactgtctcccatcacccccagatggaaccatgcagttgcaggaaaactagctcagggctcccactgattccacattatggtgagttgtgtaattatttcattatatattacagtgaaataatagaaatgaagcacacaataaatgtaatgggcttgaatcatctccacatcatcccttccccttctcccgggtccgtggaagaattgtcttcaagaaaactggtctcaggtagcaaaaaggttgggaaccgctggtgtaaatgcttcaaggaatagttaagcagcttaaggtttacatgctacaaaaagtacaggttcaaacgctaataaaaatgggtgcaaatgaaaacactctcttgctgtggtccaaggagttttaagcattctatcagaaagacttgcagcttggagctgcagctgccctcccacatcctgtccactgtaacccctgcaacacacaaacacacatatgcacacacgcgtgcacacacacacacacacacacacacacacgctgtgcttcatgccctcacttgggtggcctgggagggaatgtgtttgtttgtttgtttgtgtgtttgtttgtttgttttttgagatggagtttcactcttgttgcccaggctggagtacaatggcgaaatctcggctctctgcagcttccgccttctgggttcaagcaattctcctgccttcgcctcccaagtagctgggattacaggcatgtgccaccatgcctgggtaattttgtatttttaatagagatggggtttctccatgttggtcgggctggtctcgaactcccgatctcaggtgatccgcctgcctcagccttctaaagtggcgggattacacgcatgagtcaccgcgcccagccgggaatgcatgcttttaggagaaacgaagacaactcaggcccctcattctcctggtgtttgcacaagtgccttctccacagaccatgcttcagtctctttcttagttctccttcttactgaaagagagaagcagagtcccatcatgtacccagctgcttggggcccaagccaagtgtgcaagcttcctggggagcctagtgagtggaaggcactgcagactctccccaaagaagcatcagtttttgatggatccttgagcccaggaaggcaatagacaagacatcatggttcaccagaagagacaacaaaaatgcggtgaggaagggcagtagtcaaaggttttatgctccatgagaaggggttctcagggctctaagcagcaggcagactttattgcatgtgtggttaggtgatggcgacctacagttttcactgggaactgggatcaagagtaactcgacctcctactcctgcacgtctctctctgtctctttgtgttttgtatctctctccccatctcaccctccttatcctctcagcctcctctgtctctctccaaatctctcttcctctctcactttcccttctcctcatctctctttctctctccttcttttccagttctctctccctcctcatctcgctgcatgccactgttcacgctcctggggctccacgtrgacaggtggacatgggactcctaggctaattttcacggcacaagcacagggctgcaggaccttggtcccccacctcccagcaccctcaaaatgagaggtgtggggtctgcccgtgctctcctgggtgggcgtcccacgctccaggaagcagaaactgcaggacaaagctggcgcaagtgacatgcccgcgtggctgccggcttccatcttgggatctgctgaggccaaagcagaagacacctgccccggaccgaccctgcaccagggtaggggtaggggtgggtttgggggtgggaagggcgatgggagcagacactgcaaagcagtccctggctggcttcctgccccgcaccctgccatgcgaggcctctcctcccgcccccagccctgcccctcaccacctccacccctaggctgtccagatccaggctccagaagtctcctaggatccaagaactaagggcaaccactgggctccgcagcccctagtccatgagtcagccacccctctgcatgctgacaaaccttggctgtcacttatcctccaccccaaaccagccccagccccatcctattgcaggcctgtgtggctgctggagaggctgggctcccttcctcaccctgaggctgcctgatatgctttctggatcctggagaaaactgacccactattctcatactggtgcaacttcttccaagacctcaaaactggaccacatgaacttgtcttccttcttgtttctccttgctagggctgtcattgggacagtccgagatggggggtcgggggagacaatggatgaatggatggatgaatggacgtccccccaccagcattaccacctcctcctaaacatagtcctgagagctctatttcctggtaaacttcccccttcccaccctggtccagagaagcccaaaggccagtgccctccacccacgcttcctggggtacactctactctcttcttgcccagatgtcttaacctggctctaccaagctagaacagatagcagggatgagcccccagcctctaccaggaagatttgccaaaatgttctcagtttagaagcaggggcagtgacggggcctagggatgaccccagggttgtcactcaagcaacaagaagggcaaggagscctgtttcctgcccttatcctgggagaacttggccagggctccacaatgccctgcaggggcaggaggagaacaaatacacccttctctggaggaagtcaccaccatccccaggaagcaggagatgggagcacactggcagagccctcgcgtgctatagggcaaggccggcaggtctgtactcagcctcagccccaggggagctgcaacatagactgagaccctcacatgtttggctctgtgtccccacccaaaactcatctgggattgtaatcctcctgtgtcaagggaggaatctggtgggaggagattggatttggggacagtttcccccgtgctgctccccggatagtgaggtagttctcaggagagctgatagtttcaaagtgtggcacttactggttctccactcactccctcctgccgtcttgtgaagaaggtgcctgcttccccttccccttctgccatgattgtaagtttccggaastgcaagtcaattaagcctgtttcctttataaattacccaatctcaggtatttctttacatcagtgtgaaaacaaatgaatacagtccccttccctgaggtgccttccccttaggcaaccagctgcccccatgctcctcttctgccccctggtatttcctttcccctcatgaggcccaagtgatccacatggccagccccagccccatcctactgcaggcctgtgtggctgctggagaggccaggctcctttccgcaccccgaggctgcccgatatgctttctggatcctgtagaaaactgacccactattctcataccggtgcaacttcttccaatacctcaaaactggacaacgtgaacttatcttgttgcttgtctcttcttgctagggctgtcattgggacagtccgagatgggggggtggggggagacaatggatgaatggatggatgaatggacagtagtccagggagatgtccctgtgtgtcctgaactgggcccttcctccaatgagaagccttcctgagtgagtttctacagtcatcccttggtatccatggattagttctagggtccccggggatgacaaaatccatggatcctcaagtctctgacataacatggcctagtatttacatatcagctatgcacatcctcctgtagacattagaccatctctagattattcaggatgtgtaatacaatgcagatgctacataaatggtcatgatactgtattctttagggaataatgacaagaacaaagtctgcacatgttcaatagaaatataaccatccaatttattttctgaatattttccatctgctgttgctgaatctacagatgcagagctcctggatatgagagccaagtgtgctttgagagtagggtgggtgaggttgctaatgagtacagggggacaggtgttgatcaggaggaccctgcactggggcatctggacgtcctgcctcaggacttgagactccagttggatggcacaggcagactcggcacaggcagactcagcccaggtcaaagccgtccccttgaagtttcattttatcccaagctctttctggaccctggaatttggcatcccctaggccctgcgtggaaggacagatgaatcaggttttagataacatgtctagaagagtgagcccctactgtgtgcccggcactttcctcacaggatcctctagctagaatatccaagggtcatggagagaaatacccagttaaaatatcagaaatgaaaaagcgataccattagagacactaaaaagaccattaggtaatagtattagcttttgtattctgagatccagcagcagcagcagtcacttccctccacccctatgtgtatcccaggaccaccctgggcagggagggctgaggttagggagcagccatggatgctctgatgctggccctgggcgctctgatgctggccctgggcctcgggggtgacagtgatgaggaactgggtgcacacatgagtggggcagccgggcctggccagagaagcaacacacatgtgcacagacatgtttagccacatacacgtgtgcacgcacgtgcacaaacacattgcaggcaggcatgttgacgcctcaggcagcggaggaccctgactctgggcgctgctgacccgggcaaggccccattgtgatgcgtgccatgacctcagaatgtcactggtgcttagcacctatccgctctctggcctgcctcagtgttctacggcagttacacacaggcastggtatctgtgagcagctctgtggactcaaaggttttctccctgagaggcatgacccaggccagctgattcatcagagtcaggtgagcgtgacctgctctcttccctccaggcggacttggagacagtggctacggtgcgggcggtgttggcctctgtggggcagctaccgaggagggtcatccctgagcactcaccaggcgcccgttctacactgcccgtgtagacgattggctctttcgtctccatggtggcttcgtagagtgggtgctgttcccaaatgtaaccattcgacagatgagacgtctggggtcagagaggcagtaaccggcctgggaatccggacatgaccctgagttttgctctcagccctgccgtgtgctgtgctggaattcaggcctgaaccctgtgacctccctgccctagatcccaaatctgcccaggtttccgatcccgatggggcagagcctggtcctggcagagccactggtacagatccactggtacagatccactggtatagatccactgacggtcctcagaacacctctgtgccctaagctgggtcccgatggtcgctgtgggccccactgaacacacatggtcccttgtccgggggagcctgctgcccttgggcagctgtggaaaatgaaggagccctggagggctggctgaggggagactatcttcccttctgttcaaaggggtccgggcactagggttctccccaggcatttcttgctctgtgtggtcctcttgargcctcgccctccttttgcctcgagtattcccaggagggacagtccatccaggtgttctccaggaccaaggacccactgttcttcctcagtgacccaagaaaatgaagcctcctcctgttgggacggctcagaatggtggactccacagtccctccgcgagagacatggtttccatgcgtacaatagatcttyctcatcccccaaaccsaacaccctcctgctcaacaggcgttattcctraagtggcttcactgttcagactgaagagccacggtagccaaagtgatsagcggagtagamccgagcagtcrggagagatcttgttccctgtaggaaactgggcatckctgaggccctgagcatcccaggaggccgattgyacagagacctctggtcgctgaccccagtctgcctccacatccctggaatagcccatcatgggcccttcacccttggcaggtggaaaccattcaacctgctggggccggtgtgtccccatttcatggcaytgggggacaacaggattctctgtctaggtcccactgtactcaagtccttgggaagaygcccacccctgcttgggacttgagactccagagactggagcagctgygggccactgggtctggcccctttttmcctgggggcggcggtggaatgggggytacgcagccagccagcatctgggagcccggygagagcrgttcaggtgttctccgaagccgccgcgtacagtgtgacytttagacaattytgtctcacaggatggacgtggtagaggtcgygggcagttggtgggcacaagagcgagaggacatcattatgaaatacgaaaaggtacaagtcggtctgcttcttggagggaggcctcttccagtgtgccctggtcaaagggtcytgggctccctaggagcacagggcagggacgggtggccaatgcccccaggcccttgcaccctttaccttggacccctcaccaaggctscctctgggctacagggacaccgagctgggctgccagaggacaaggggcctaagccttttcgaagctacaacaacaacgtcgatcatttggggattgtacagtgagtcctctgcactcccctcacccctaaagcacctgtctcagctcagggatgggtttgcttttagaaaggcctttctgacgcaggacatgtctcaccaggtcgggtcaacctcctttccagggayagaactcctccctgactcccctgcaggtccagcccgaggttgttgttaggccagaggtgtggggcccatctagggagctggtgggaatggagactgggctaggtcaggcccctgggcgctcagcagttctgtcggcaagtgagcacaagaggagctgggcagcctgagggtctggccctgtctacttggagacaaccccggtgagatgcaagggttatggccacagggtgaggggackcctggcccggcctcagggctgttgtscagcaggtctctgagggcccacctgcccctgttctcccccatgcccctagagctatgrccctcactgtcccgtgaggggaaaaggcatggtgacaatgggggctgtagccctaggagaacggggggaagatgggcagggccccgttctgggcatctcacggtgaggccggggaggcagcagggctcgcrgmtaaagacctgggtctggtgctgggaagggatmtggggccgggtaagaggagcccagccagragcccatccctcagggatcacaggatggagagacagaggatcccaggggaggtagggcgggagggagctgatgagcsgtgccacttctgaaacgcagggtgtgtggcycgggtgcagggagaggcaggtggatgctgggaggtcagaacctgcaagggccttggggctgtcaagtgggatgggcccctggtgcacccagagtacacggggcaggtctcagggcaggctcccttgaccctggyggggtgatgtggtcactccctgagggactcctgtcagggcccggtcacccaccctgggcggcccccatcccatctcagggctaacctttctcagctccagcagaaagcaccacctcgagtccaggacgggcagccccaytgggcagcctgaccgccccccacgccaggggccccagtaacccyggccaggctgtccctacactccttcttctcccaggtcctgccsctcctgggartcagccccacaggaaggcccttgtcctcccttccctgtgccttctcctgggctgagccctgagctggaaagggacagagccagtcctttctgggggtcggcacccaggctggggccgctscaggccccgtgcagttcctcagctctgcctgggttgccttacagtgagacggagctgcctcctctgactgcgcgggaggcgaaggtaagagcctgatgcgtggaggggctggtccagggacgtagggactgggcgggtggtcagtgaggcagaggaagcagctggcctgagcggtggcgggwgagggcaacacrctgtcactgggaggggcagcagtccctgctggacctgaccccaggttgctgttaactttggcagtttgataaaattccaaaaggagaaccacagtcctggcttgggggtggctgcrcgcttgtgtcaggaycccacctagaggctgggacctaagactggtgtggctgtggcctgaggatggtacatcccggggtcccaaagccagcccactggtgctcatttgctcaaaggctctcagcccttgaggtctgcccttccctggctccttccagctggctcccaccagggctccagagcccaagacccagcatccgcgggcggctctgggaagcctggcagctcygctaactccaacatgcctcatttgacagcaaattcggcgggagatcagccgaaagagcaagtgggtgaaaatgctgggagaatgggacacctacaaaaacagcagaaaggtaatgtgtggagggaggaagcactctctgcagagacaggggacaggcacccatggctgtggcctggcgccgtcagcctctcagagggtgggtggcacgctgtcctcgcccagaggactgcaggcctggtcrccagatttcctgcctactcgtgcaagcgtcaccttgctgggagggaatctgaatctagggctgggactacccggagctcaaggctagggatgccctggtgacctgaaggaaggaaaaggttcagatcagagtttcgactctgagtgtccatccactctttcagtcctgggaagggagaccctgtcccagcttgatctcacctctactgaggaatcayggggccaaaaccracaatttccagaatccccgggctctggtcctcactggggtcaccccgtggcctgygacaccagatyrttttctgcccacagctcatagatcgagcrtaccagggaattcccatgaacatccggggcccgatgtggtcagtcctcctgaacaytgaggaaatcaagttgaaaaaccccggaagataccaggtacrctcagccagagcacaaccaacaggacaggccgtgtcaggggcccaggtctccagctggagggaacgtcaagaccaccctggggakctgggggtgaaggtcagwtgaacaccctgggcacagatggtgacacagtcaccacagacaaactcagctctggtgaccctccctggcttcagtaacaagccaaaatgcagctttctgcagaaggaaaccttccttctgtccttccttcccgaastgctgactgtgggctgactgccactgggggcagggagtcttccatctgttctgagactgcttcctcckcttggccctgccctacagatcatgaaggagaagggcaagaggtcatctgarcacatccagcagatggacckggacgtaagcgggacattaaggargcatatattcttcagggatcgatacggaaccaagtaagccacagggtcccagcagagatggggtgaatgagagggatgggggcttccccggagcagaagccagggtcacccaggagggatgacacagctgccaagagctctccyggcccagggagcagccggcaccatgaaccgagcacctccctggttccaagccctgggccagactggaacatgtggggccagaacccaggaggatcctgaggagatggaaggcagcaaacaaaatcatgcacaatggtgaaaggtgctctccctgacccatggggacccatggtaggagccacgggagggtggcaggatagagggcaccaaatgctgggagaattaggggtcctggaaactctcatccaggtctgctgggaacatgacatggcacagccacgttggcagccagttgggcagtggctcacaaagctcgatggacttgaaccacgcatccccaaagtgtcacagagattgaacccactgatttggaaactgacatccacatgaaacctgcatgccaggttcactgcttgactcctcgtcactcacacacggagccttcggggacggccttcaacacgggratggggagagcaaggctggtcctcccttcaaacggaagacccagtgagaaaagggaacgagccagtgatgcccgcacgaacgtgggtggatcctagatgcattttgctgagggacagaagcyagacccaataagctaccacagtaggattcccattcctaggccattctggaaaaggccaaaccacagggactgagaagcagtctgggtggccaggggctgacggatcggggagaggctggktgcataggggccaccctggagacttggaggatgaaggagtcgccccaggaggggctggagcggtggccgggagactctgcacatyggtttggaaccgtggaggaactgtacacccacagactgaactggggtgtgtgcaaactgaaaaaaaaaaaaaaaatcattcagagtgaaaaggatcaggcactgtacaactgggctatttgcatgtcacagatgtggattttactgaaacatttcttcaagagtctsaggycctgaagagctcactgcttatccggtgaatcatctgaacctgaaatgggatttgctgttaggctttgtagacaaagtgaaattaacaacatctgcacaaaacaaaccaaagccccctttctctgtttcctaggcagcgggaactactttacatcctcctggcgtatgaggagtayaacccggtgagtattcccggcagtgaggttcccgggccatatttccatattcacaggagtgggtgtctggtgggggtgtcgttgcttcttttaaaattagtatttgtgacccaccaggatataggaagtaggatgtsagctcactgctggcataaacctccaaggaagggggtggtctcaaggggtcaagctgakacacaraggagtcagggccbggactcctggtgtcacctgggcctgaccaccacttctcagaacaagaaatgacgccgtcctcctggggctgccccaaagcccaggagcttggcagcatcgcacacaggatggtgctatcagcagacattttggacaaggtgctgaagtgcctgatggacttggctcttstcatgaaatgaatgtgcatcctgaggaagcctctttttcagaggaagcctctycttcagaggaagcctctccagtcacctctgcyctctccaatgacatgagtcctcccaggtgagctcagccctcccagstgatgtccttccatggtgactctggctcttgcaggaggtgggctactgcagggayctgagccacatcgccgccttgttcctcctytatyttcctgaggaggatgcattctgggcactggtgcagctgctggccagtgagaggcactcyctgcagggtaagtgaacagctgccccggggacctcctgcagccagacctggggatggccaccctggccrggtgatcacagctttcagccaaggcaccctccttgtgtcgccagcttgttgggagactttagratgtctctgctgagggtcccacaggagtccacggctgacccccaaagcccaaatcagacgcctstcatccccatcagcagagggcatctcatcctccccrtggccaccctctgtgtcctggagccacgccctcyggctctgattctgtgcagctgactctcccctccctgagagtcctcctgccctccagctgcccrggctcctgctgccatcggtgcccacgaaygggccgaccaagcccaggtggcagcatctccccatcccctgttccctggcccgaccccactaccaggagatgaccaggaagcccagcacccacccagttccagccgccctgtggtggcctgaaagtcaggcttgccctttttgcaccctggcccaggaggcctccaggggaacctccagccaggctccagggactgttcccgccccacctccccagggtaaaggccgcatgttggggtcaccagakgggagggtgggaggccttggggtttgggggcctctccagctgcccagctcttgcagctgatggctccacatcttgggggaaggctctgatttcaygatgggctgggggcttctcaggatttcacagcccaaatggcgggaccgtccaggggctccaagaccaacaggagcatgtggtagccacgtcacwayccaasaccatgkggcatyaggtgagtttatggtcccctcagctcttcccagaggccctgcctcccgtggggctgtaggagcaggggggckggrgcccctcgtggggctggtgactggctgagtcccagccagggccygacctgggacgtcgggttctccatgggctgggagttggtttcctttcctgccctggaggagacagaggcacagggatgggggcccagctcccrcagagcagbgcaaagggcagygtgtccaccgggagtgtgggaaggtgacagtgttgtggggagctctggacacygcccagtgttctgcaytaggggaaggstcttcagaggccctggaagagggaggtttttagggcagcccagtggcctgagcacctctgttgcttccatcaggacaagaaagatctatgtgggcagtgttcgtccttaggctgcctcatccggatattgattganggggtaaggaggcatagggagaccctggctcagggaccytccttgccctgcagtgccctgcttccccagcccgggggtctggctcactcccagcccacaggaggctcaggcgggtccccaaaggacacacaagcaaaaccctctgcccaagrggggtcatcccagggcmatggctggggctcaggcccagcctcatgggcagactgggccaggacccgacttgagagggctcagggaagcctcaagccctgggcaagcccctctctccaggagccacatccccactcaaatgagtgcctcccatgaggagcttcaagaccttgtctgacccagcgtcctggagggctcaggcgaccctcatggggaaggaaggtcactgactcaggagactgaagccccagtgtgcgcagctcgagccaccagccccagcctggaaggaccaggttctttcacacctgctgtccccacagatctctctcgggctcaccctgcgcctgtgggacgtgtatctggtagaaggcgaacaggcgttgatgccgataacaagaatcgcctttaaggttcagyagagtaagtctacgtgtgcccagcggggcctggggagccctggggtcagaccccgactggcccgagggcagcttcctcacactgtcctcatgatcckctgttctggcccagagggaggtcyggccaggtggkctgggcaggacactgtgacaccgagcccatyccccacatgacccagatgaaagtcgagagtgtggtgagcacttccctgtccrgatcrccccccagccacagtctcctgtrtrtatctggacrcctggggtggccacaaaaggatcyggcaccgcccagtaggagactgaagtggccacggggtatgagctgtgaccattcccaggtaactcccctggcctgatatccaccctgtccctagagcgcctcacgaagacgtccaggtgtggcccgtgggcacgtttttggaaccggttcgttgatgcctgggccagggatgakgacactgtgctcaagcatcttagggcctctatgaagaaactaacaagaaagmagggggacctgcmacccccaggtgggctccagtgccatgtcccctcccatgtcaccctctggggtagtcaatagtaggggagtgcccrggacccgcaaccctactacctgggccttcctcttcaccttttcttcctcctcttcctcctggactctaagaaagtacaggaggcccaccggtcctcagggcaggcgctcagtgcgtgtatactrgacatgctgtgcacgcaggagggggatgtgggcgagaccctccaacaagccccctcccactttctgcggtgtctccctctccccctcgcagggccctccaagttactagccgagcccagacccatttgtgggagaccccgcccctccctgcaagcacccacagcctcagagagcagcagaggcccctcactcctgcacgctcctccaagcttgccaggacaacgagcctggagccagggagacaagggaatcggtgtccctgacccacggagctttcagggagagggcgcaggcgggaccccgggcccagggccagagccaagagttcagccagaagtgggaacggtcagtcctggcatggactgggcagcccaggagggcagagggtgacccacgtccgggcccaatcacccactgcggagaggggtccccacctgaggtggcaaggggctgggtgacatccaaggcccctcccacctgagttctgactgggggccgtatcccaggcccaacagccctgggacgaaggtgtgtggcaggaagccgccagccagtctgaaccctgggggcagtcccaggagccacccgccatgccacgacagcttccccacgccaggcagcaygcacccctccctctgggatcagcagactacaggcgtgtcctcagtgtcaggccacgggggccacacagrgaccccgaggactccagagacgcaggcaggtggggcccagcccggaaaggcctgcgtgggctcactggagatgctgaccgcgtctgttttcctttcagccaaacccgagcaagggtcgtcggcatccaggcctgtgccrgcttcacgkggcgggaagaccctctgcaagggggacagrcaggcccctccaggcccaccagccyggttcccryggcccatttggtcagcttccccgccacgggcacctcgttcttccacaccctgtcctggtggggctgtccgggaagacacctaccctgtgggcactcagggtgtgcccagcccggccctggctcagggaggacctcagggttcctggagattcctgcagtggaactccatgccccgcctcccaacsgacctggacgtaggggasccttggttccgccrttatgatttcagacagagctgctgggtccgtgccatatcccaggaggaccagccggccacctgctggcaggctgaacaccctgcggagcgggtgagatcggctttcactgcactgagccacaacgtgggcatggacttcccggccctgcagtgcgcccagcactgattccgaccagggcacccccttcagagctagggacgaacagcmgtgtgctcccacctcaggaccttgcctctgcggcctccacttggaaagttctcagttccctccaggcttctagaagcatctgggccagggctcatggctggataatttccctaggcttaacaacccaagcaagcttcgcrtcctsgttttattttytgttaaacttatgagaatrtrttaagaaagagtgcagctcgagagasattcagagatggarcacaccagaccccagatcacaaagccaaccatgcccrgcccctcscarcaccccmagccccacgaccatcgttytgaattctgacgacrccgtgagcctgcctttgtacttyaaactcatggmaggatracyaccttcaygttttgaaataaatgtttcctgttgaaatgmttttagattttagacagaaatattgaaaaggcactatagtgtcctcctataccttccatccagctgcccctaataatgatgttttgcagtcccatggcacataagaaatttaggccgggtgtggtggctcacacctgtaatcccagcaatttgagaggtcgaggcgggaggtgcaggttcacttgagtctagaagtctgagaccagcctgggaaacctaggtggacccggtctctagagaaaagtcaaagaaattagccaggcatggtggcgcgtgcctatagtcccacctagtcaggaggctgaggcaggaggattgctggagcccacgagttccaggaagcagtgagccatgattgcaccactgcactccagcctgggtgacagagtgagactttatctcttaaaaaaatttaagaaatttaatgtgggtacaattctattaactaaataataatgtgaactattatctaaggttatgaaggctagaattatcccatttttgcctaacttctcgtacctgtcccaagatcccaccttggactcaccctctgccttccactcatgtctcttcagcttccttcacatggtccagcaaacacacacctgggctgaatggtagagctgattgctcatacacaaaggtagaccggtgggcagggattttcagacttatacagtcaatgagttttccttggtgttctggagagcaccgttgagaaacactttgacagtgaatctaggcctcaggatccatcagctgctctagcttgaattttgctcaagctcagtgaacacctgctctgccgggtgcacgtgaaaggggcaaggatgagtaagctgtagataaagaagacaggacgcagggggtctgtctaagctctatcccctgccttcagcactgagggatgaaatccaactcttagggaacggtggccacgtgctgggccagccccaggctctcaggatctgacagtgagtgacgcagaaccaggccttgcccctggggagctctccagcatacacctccctctcccctcccagcgtcccgcaaagcagacrtcaackccattgttaatgcacagaggaggaacctgactgttagacctgggttttccagggttgcacggcttctgggagacggatgtgaccctgaggatagggcacaggccagtgtaatgccaggatggaatgagctgtgatctgtgctgcacagaggcctaggccaaggtgggactgacggatgaccaggtcagccgggtcactgaaaacactcttgggtcctcacctgctggttcccaggagtccggaactgccaggagagtggtggcaggtcccccatcctcagctgggtgggcctggatagaacagcaaggcgagggcacatttccctggccgttccctccaggcacagctgtgacctgctcattccaattttggggaaatatttccacatacacagaactgcaaagagcagtggacatggtgagaggtgtttggacatgggataggcaggattttggaggcagagcccccagggcttgccgatgggttagctgcagggcttgagcggggaaggagaatccaggatgatgtgttcacatcggtccattcgcttcctccgtgccacgcctgtgctgggcactgggagagacagatgagcacaggagcaccaggctgggggaggtgtggggggaagcccagagtgtctgggcagggtaggaaacccagagcgtctactgggagctgaaggcttatgtctacctcaatgctgtccgcgttcgctgtatgaacaagttcaggctgagctgcctggaggaggagcagctgctgttgctggtgaccagcacgttcgggaacggagactgctctggtaacggagagatgggtggcctgaggtctggatggtctagggggtgatagggcacagaaggacccaggaaagggtctgggggatgcaggacgttctacagagggcgtttgggagtcagtgctcaggycactccaggtcacgcaggtcatttgctggcctctgtcgtaattattgccatatgagagtgccacctttcctgcgacataatttagatattcctgtgaatggcctacctgtttatatttacaacttcatgtttaaaggaaatttgtatcactctcacaaatggaaagccagcaaaacataaattcaatgaaaacaaaatgaagtcaatgaactttagctagatgctattccctgaccaaggcctgctggaggcggtacaaccagggtttgaattgagatctgccaagcttctgagtttattctgtttcccccgcaccagggttcctcaatactgcattactgacatcaggggccagacgattctttgcgatgggggctgtcctgcacctggcaggatgtttagcagcttctctggcctccacccactggaagccaggggaatgcagaagaggcttgyttattctcccatttaatgctcaggacaatatctgacataaatgttatgtcttttattttataaatgaagaaaatgagactcagaaaggtttaagcgagtcacctaagaacacacagacagcaagaggtagaacccgaaactgaacacaggtgtccacatgagacaacaaaaaagttcagattccagcttcctttgagtctctcatttcaacaatggccatcatctgcatacgagctgaagtacaggaaagctgggctgaactctcctcccatcaggcctaggagccccggaccagaaccccagcccaaggtctcccagtcaggcccgctggagggagctggcatccacactagcatggtttctcaaagctacagggatgccagtctcgccgctgatgaagaaaatgaagggcatttgcttctcctgcaggctgtcgggatttaacacagattccttttcttgctctcttctcccgtagcacaaaactgggtggtccatccccctcccgctgtcccaaggctttgttgcgtgttctctttaatttctcccactctggcagtgcaccctaccctcgtctccctggcaaccattctgctctatcctctccacacctggatcacaagaacacttgggaggccccttaacaagctacatcccaaattatgattcccctttgtcctcagccagtgcccaggtccaacttgctctcctgaggtgactttctttcctgcccaatatggtttcctcatctgtaaattggggataatcgaagtcttgatcctgatattgggctctcaaagcagaagtagcaagctcagccaagtcacttaaacaagaggagacgttccttgtgaaccaaaagggcactggtcacaagggccgctccttctctcaggcctctccagcacacccttggctcagccaaagaagagactcaggctgtgcttctgcgctgtggggataacgtaagtacctggtccttgaccctgggactttaacagttccctcttgtggctcagttctacagcttcaatgacaaaaagtggcttttgctcaaaatagcctttgataggttaaggtactcctctgccactctaagtctgtgtggaacagacagggttttgcttcacagagaagatgcataaaatttggtcttaaaaatgagttcaccatgcacacatacacacgaaaaaagtaaatactgcattactgtatatatgaggttccaaaataggcaaaactaatttatggtgacagaatagtggtgacctctgagggtcagtatcgactgggagagaacagaagagagcctactggggtgctggaaatgttctgtatcttaattttgcaggataattccttggatgcatccctaaaaattcagtcaagctatgtagtaagatttgtacagtttacgtaagtaataggagagataagagggggaacctgtggagaagcagaacatttcaagatctagaaagcaacatttgcaagggtacacagtgttcagacagggaccaaatcatagaaactactagggcttgccatgctgaaacgactgacttcaaaccatagggcatacataccttccactgaagaagagcacctgagtgaaatgactagaggtgcatttcaaagattattctattggaaatataaagaacgaattggaggagtaggaggcaaatagtccaagggacagatgaagaccttttttttttttttttgagacagggtctccctctgtcaccctagctggagtgcagttgtgcgatcatggctcactgcagcctctacttcctgcgctcatgcaatccttccatctcagcctcccaagtgtctgggactccagatgtgcggaccacacctggctaatttttttattttgttgtagtgacgggaatctcactgttgtttcccaggctggtcttgaactcctgaactcaggcaatcttctggccttaacctctcaaagtgctgggattacaggtatgggctacagtgcctggccttattaaaatgttgatgtaataaatgggactacctagtgctgtgctttctccttaaaggagagagctgacagaataaaactagcagtaataatctggtaaattgtgctttctacagagtaaattttgtttgtctcatgacatttatgcaaatattcaaatgtttcaggaatataaacatttaaaatttgggttataaataatgcctcctggctctgaaattatctgaattcatgaagcaatcagtagtaaatatgaaggaaaaatgaaacacagccttatatgcaaggacaaacacaaatttctaattcttgttataatttgggtgcccacctggttttgaaggtgagccttggtttgactggttctgagacatttctctcaaatagcaaatgagtagtgggtatgaatagggtacattggaaagtcatgtcaaaattccatgtaatttttggagcgttttttctcccatgtaatttatataatttgacatgtgtattcctatgtaaaatatttaaccacttctctacaacaagcattaagtgggctaattagtatgctcttcttatttcatatttctgtgatttctcttatctggaatgacttttttatgccacccaggctggagtgcagtggcacatttactgctcactgcagcctcaactccccagggtcaagccatcctcctacttcagcttccctagcagctgggactacaggtgtgcaccactatgccctgctaatttttgtgtttttttgtagagacggggttttgctatgttgccccggctggtcttgaactcctgagctcaagagatccacccaccgcaacctcccaaagtgttgggattacaggcgtgagccactgcactaagcttcttttctaatttgtttttattctgagatcagatgagatcggcatgttcaggttggtatggccatagactgcttttatctattctaataattttgtattgtacaatgtgttggaaaggcaagatgaagttagattatgaagggttcatttccattcaattctgtctatccttctggacttggtgatttttgttgctttgtccaagaatacccaagtgagttatttgtccgtttttctgtatagacagcatgttttgtaacttaccatcattttgtatacataagttagactatttttatgtacccttttgtttagtcagattggtttgatcacttaatgtttgtacctcttgaggaaaaatttagttgggaaaatagtggtgaattcctgtgacactgctgtttgaacattaggagacagcaatcaaatatatgactgatggatgtttactgaaacatattctgggagacccaantcttaccaaattcagwgtcattattttggatgaagcccatgaaagaactctaactacagtgagtattttaatttattattattttttattagcaagtagtttgtttgggtagctttttattgtgtagagaattgcctcctcttactttttaatttaatttaattttttagagatggagtcttgct

SEQ ID NO: 96157 - DNA, 33565 bp, Homo sapiens
agctcgtccgtgtctgcagtctccaagagcccccgggaacttcaaacccatgcccctctaccctgcagggggaagaggcagatgagtaaccaggcaccccttagaagtgtccattcagaaattctttttctggcctgatgcgagtttcaaaatctgccttctgtggtataaggtgttgaggaaaatacttcacacacacacgcagctgggctgggcagctgctaccccggggccctcctactggtcattctgacacaggccatactgctctggggtttatcagcagggtgggccccgcaaggggcttatctccagctggggtgggcagggagatgccctcatgcttcaggtcactaactacacacctgtgccagggcagtgcgtgcgggcaccactgccaccttgccccatccttgctaggcctttgtgggggccgcagaggctgagcctagagctgaccgtgtcagacaccccaacagaatggtgccttcctgcagaagctggtccagacccagatctggaagcagctatagagaaagcctgggtcagcccccagcccttgattccgcagggagcaaagaccctaccgagcctttcccagaactgctactagccccaagcgaggtggtctcgtgttgcgttgctgcttctgcctgtgctgtgggggagagaggcggtggggtggtgaaaccacaggatggaggctaatcccactggacagacaccagcacagccagggaggatgagctccgaggcagcagcccctgccagacagtttctcccacgctcccagttcacttcttacatgctccaggggagtccccaagcccagtgccagggtgttgtcagcagttcggctcatcgggcaagggccttctgagcttgggctgagccaaagggcttcaccttcttgctcctggattttcccagctttgctagacatgtgaactcagacccaggtgccaagctgtacgggcatgctgccagcagccaggactttgggctggcccctcccctggtgcaggataacatgaggtggcacctgcacagtgggcatgacgtgtctctcgggtcccaagtctaacctgatcctcgtggccccacctgggacctgtttgtatggcctggcgctccagagaggcctcctcgcctccagcagcctgcgcctgcagtctcctctcccaacctccacaggtccgtggctcccagcagtcccctagcatccacctcctcagccacccccaggtggacacttcttccattcaggagagtgacaagtcacagtgccagccagtgctaggtcagggtctgggatgtgaccaactaaccatgggttactgtggtttctgagaaccttctctgtgcccaacactgccctgcaccataatgagcgcctgccacactccgcagggcccacactcaccaccgcgctgctgctggatttctcacctccactccgggcacagcaggctgctgctcagtgggaacacaggagggacctcggagcactgcccaggtatccatgagcctgctgttgttacccccaccacaccttcgaccggactgaaggttgaaagggagctgttttgctctgagaactctacttttaagagtagtagctggccagaagcagatcacttgagctcagcagttcaaaaccagcctgggcaacacaggagaccccatctttaaaaaaataaaaattaggtgggcatggtggtgcacaactgtagtcccagctactcaggaggctgaagcaggaggatcacttgaggctacaaggcagaggctgcagtgggccatgactgcaccactgtgctccagcctaggtgacagagtgagaccctgtctcaaaagagtaatattgtacacacagtacatttcaaaaactgcatcaatcaaaacatttaatcacaaaccagttggctgggcatgatggctcacgcctgtaatcccagcactttgggaggccgaggcaggaggatcacgaggtcaggagttcgagaccagcctgacaaacatggtgaaaccctgcctctactaaaaatacaaaaatcatccagggttggtggtacacgcttataatcccagctactcaggaggccaaggcaggagaatcgcttgaacctgggaggcagaggttgcaggagaatcgcttgaacctgggaggtggaggttgcagtgagccaagatcacgccaccacactccagcctgggcaacagagggagactctgtctcgaaaaaacaaaaaacaaacaaaaaccaactaagcaacatttaatggatcccttcaccaagcctgagactccctaaaggatgtctggagcacctgtgatgatccaaagaaataccagccacaggagggctctgacccccaagggcacactcctcgaagggcctgggcatgaggtgaacacagcccatcttctcaccctagggttagaaggcacaggagcaggcctcaggaaaaggacatcagccctctgcaggtgcccagcggaaccagcctgcattcttgggggcaggacccatgccctgcacatttccatccactcaacaacccccatagagggcgtctcaggccatcgcagaccaggcttcctcctccagccttaccagaaagtccacctttgctgcacctgtcaggttggtgtaggaagccagtccaagggcagaggcaccttgagaggaccctatgggcagccatggcatctgtctaagatactgtgattcggctgggcgtgctggctcacatctgtaaccccagtgctttgggaagctgaagaggggaggatcctttgaggtcaggagttcaagaccagcctgagcaacatagcaagatcctgtctttaaagaaaaaaaatgctgccatctatctaggttagtgctggttgggcacctgattttcacaggagaatgtcaggtcggccacagccacctgggctgctgttctgtagccctgccctctgctaccctggctaggccttcacccacactgaggtgtgttccactggcccagagccagcctgagactcatccacggccactgggatccttgcctggtctgtgtgccttgagtattcaccacttggtcccagttttcattgtctgtgaacacttttcctttttactttatgctctggcctaagctgccgccaaaccatcacaagctaatcaacattatggtatgtcaaatctcttcactcttcccccaacagtggacaaaacacaagctacaatatttaggcatctgaactctgacctcgtatctagatgtggtacaaatatgggctggggttttatgtaagatacagggtctctgtcacgcagacagaagtgcagtggtatgatcatggctcactgcagcctagacctcctgggcccaagctattctcctgcctcaccctccaaagtagctgagattataggcatgcaacaccatgcccagcttgtctcaggccccaaactgtggtctgtacaacagctcatggcaaccacaaaaacgttggaagatagtgcagtgacctgaagcaatttccatcatccagagagcagaaggaacaatgcctgcaatcaaaaccatttatgaagagatggtgtttcctgagtgggctccaggccagtgctcagggaggcacatactcatattccttcttggccagaaaagtcacccggaggaagcagacagttctcccagcaggtacaacttatgccgctgactgacctttgctccgctggcactggggggaagggaacaggggacccagtcttgaccacaaggagctcatattctagtggagggagttccctgtcggaaggagaagcatgttctcaggaacaactgatcaacaaacagaaactctcaaagtacaaaagcaacttactctacgttttaccatttcaaaagtcaggatactattgcagtcaatgtgtatacatttaacatgggagtacctcccttttgcctgccaagtttcaactttaaaatcagtggcggtgccgattcccagcggaggaaagtgaggaggaatggagagggcaggcacctggggaaaaggagagcagcagattccaggcagtgagggagacggagggctgccagtgtccaacactaacaaaatgcagaccatctatgtaattttaaaagtttctaaaagccacgttaaaagatagaagaggaggcctggtgcggtggctcacgcctataatcccaacgctttgggaggccaaggcgggtggatcacctgacgtcaggagttcgagaccagcctggccaacatggtaaaaccctgtctctactaaaaatacaaaaattagctgggcatggtggtgcatgcctgtaatcccagctactcgggaggctgaggcaggagaatcgcttgaatccgggaggtggagtgagccgagatcgcccactgcactccagcttggatgacaaagtgagattctgtctcaaaaaaataaaaaataaaaattttaaaaaaaggacatttttttactattttttgagatagggtgtcgatctgtcgcccaggctggagtgcagtggtgggatcatggctcaccgcagcctcagcctcctgggctcaaatgattctcccacctccacctcccaagtagctgggaccacaggtgcacaccaccgtgcctggctaatttttttaatttattttttgtagagacgggagtctcactatgttgcccaggctggtctcgaactcctgggctgaagggatcctcctgcctcggtctccaaaagtggtgggattacaggagtgagccacacagcacctggcctcaatattattatgtaatccaacatatgcatacagaatatttcaacatgtagtagtcaatgtaaagttattaacgaaatactgtaccttctgtccyccagcccctacacgcacacttttttttttttttttttgagatggagtctcgctctgttgcccaggctggagtgcaatggcgcgatctcggctcactgcaacctctgcctcctgggttcaagcgattctcttgcctcagcctcccgagtagctgggattacaggcgcgcgccaccaggccctgttaatttttgtatttttagtagagacgggaggtgagggggtttcaccatgttgatcaggctggtctcgaactcctgacctcgtgatccgcccgcctcggccttccaaagtgctgggattacaggcgtgagccaccgcactcggccccgcacactcagtcttagaagtttgatgtgcattgcgcactcacagcccgtctcaggtggactggccatatttcaagtgctcaggagcctcggtggcgggtcgagtcgggaggcaaacccagctgctgccttcggagtgaagcagcgcccagggtatttccacagctgtgtaacagctgcgaggtctcctgagccgaccagagcatctgagaagcaccagagaaggggcagcgtcacaggatttggcaacccgtgggaaaggaaggaagagatcgcacagggcaaagggccgctccctgaaggccttagcggggagtacctttcctgcggccgctccacgcatgagcagcgtcttcctggggcctgggagccggcaggtccccggggcccaggtcccgcccctcccgcccgtctctccagccccattctcctaaccacccgccctgtgctcgtatcccctccgaggcttcctcgcactgtgcgcacgattcccatgcccaggccctgccgccatgcctcggtgagtgtctcgcgtgacctcgcggagcgcgtcggaccgggccggctatcccacaccgagcccaccgccgaccctaggcggccaaccccaccttccacggccgccgccgcacgcttgacacgcgcgccggaaattgcgtcaccccaacttccggtccgggggcyggggggcgtgccagttgggtacgcggtccagtcagaatgcaacacgaggggtttcggaagcgcagccgcagctccgcccctaaactgggaactcctccccactgccacgttcgacgaaggaacgcgcagagtgcgcgcatcccttggccaatcaggaggcgcagagtccgtgctaccgaaaggggcagccattccagacccgtggaaggtgcaggcgaaagccaccaattagaagccaaggcagaaaaagttcttgtcgggagccaatgagaggctaagaaagacagcgagcgcgaggtcctcggccaatcccgaacgaaggccagggagcactcaggagcgtttccgaatccggggccaggcctggtgtgagtgtccaatccgagagcggcaaagacgagcctcgaagtccgccggccaatcgaaggcgggccccagcggcgcgtgcgcgccgcggccagcgcgcgcgggcgggggggcaggcgcgccccggacccaggatttataaaggcgaggccgggaccggcgcgcgctctcgtcgcccccgctgtcccggcggcgccaaccgaagcgccccgcctgmtccgtgtccgacatgctgcgccgcgctctgctgtgcctggccgtggccgccctggtgcgcgccgacgcccccgaggaggaggaccacgtcctggtgctgcggaaaagcaacttcgcggaggcgctggcggcccacaagtacctgctggtggagttctgtgagcgccgggcctggcgggcgggcggggctcggggccgctgrgccaggctcttgggacgcaggcacggcccggcagcccccggggtcgggacccccggcgcgcccggaactgaagggctcccttgctgcccgccttgggggccatgtcaggggctccctgggggtgagagccgggctgggagccggggggccgtcccgatgcccgccctgcgcacggcaggatcttcctgttagtgcgagaagaacaggatcgacctgtgtgagcaaacagagcaagccagtgtccagccttgccgagtcctccccgggggccgacccggaaggcgccccgctcctgcccaccccaccttcagcttgccacagcagtccttccgatggtgtctcagaggagaatcccaagccttcctcacgtccataaggatttgagctctgtccctggggtgggaaccttgtgcctgacacagctgctaactctattgacagatcgtcttattctcaccctaagcaactcagggtctgtgtgcacggatgtgcatctcatactcacagctagtgctggtacaggccgccacggtcacttcttcacttttgtctgtagtcttaaagggaaagtctaggggagatccttgccttagttgcctgtggggaataagaagtcagcaaccattgaaaggtttgtctggctgtgctgatggtgacatagcagagtgggggctggtgttggttggtggtagtttgtcgttcacggcctctgtcctgatattgcccaagaacaccaggctatcagctcagccttgtgcgttaggaggggttatcttggtgagtagataaggtttttatgaagggaaatgccagaggaaaaagggaagcactgctragggatcaaggctgctttagggatcaaggctgctttctagcatctcatttccgcttccagatgccccttggtgtggccactgcaaggctctggcccctgagtatgccaaagccgctgggaagctgaaggcagaaggttccgagatcaggttggccaaggtggacgccacggaggagtctgacctrgcccagcagtacggcgtgcgcggctatcccacyatcaagttcttcaggaatggagacacggcttcccccaaggaatatacaggtgtggctgtggcactgcccttgaactgtctttagagagggactggcctgcygacttggaagggcaggggcagctgtctgagcggtggggaggccgggttccagaggcttggagggatcccgttcctcagrccgggttctctgtccacttgtgccctgagggtcttgtgaggagttttcatcctggaagaaccttcgaatggagaacctgtcttgtctggtgccatcctgggggcggctggctgaggtctgtttggagactgaccagcgaggagagggagactggtgcctttctggccacatgggctgtttgtgctgcccyctgttcctaggagcagcagcatggctgtagctctcggggtgacacctgctagctgtcgtgtgtagcgtgccagctgccgcgtcacgtgcttgcgtgatttctcctcgcatcctctctgtgaggcgggcttttcccagacaaagggctgaggcttagagcagctgagtaacagcatcgagcctgtcggtagcagacctcgaatccaagcccgccctgctccgtctgtagcacgggccctcagctgctcgtctgccgcctctgaagctgccgtagtggaggccgagcccctgtgtagccagatcagtgacggtggcaaaagaaaactcgtctataaaaccggttctgtggcatgtcagatgctcatggtgggtagcccgaaagcagctcattccagtgttagcagggttctccccttaagcaggtgtgccctgtcctgttctagtggcagcaactccgtggttgcctctcacttggctgttttgatgtttccttttgtccccttaagcaggtgtgccctgtcctgttctagtggcagcagctctgtggttgcctctcacttggctgttttgatgtttcctttttttttttttttttttttttttgagacagtctcgctctgtcgtgcagtggtgcgatctctgctcactgcaacctctgcctcccgggtacaagtgattctcctgcctcagcctcttgagtagctggggctacaggtgtgcaccaccacgcctggctaatttttgtatttttagtagagacggggtttcaccatgttggccaggatggtctcgatcrtgacctcgtgatccacccgtctcggcctcctagagtgctargattacaggcgtgattgatgttctcattttttactcatgttcacttttggaacgggaagtgctctgtccaaagtcaccgtggttctgtcactaacactcaggtttgcagatgagatgagcactcctaaatccacttgtcactggtgaccgtcttgttagcactggtggaatccttctacatctgaatggggttttcccgattcggaccagggagtcaagttctaggagggaaaaaggagaggcatcattccttagcctcagtctcccaggaggaggaagtttctttcctgtcagttgaccgcctttggtggcataaaagtgtgtcatcttcttcctggtctgggaggcatggagggtgggccattggcgagaactcccgaaacgcctgggataagttaggaggcgcgggagtcaggtgggcggggcgtcagcctgttcccagaggtagaaaactggcactgagttttgagttactgtccacctctctaaaatgaggcctgctgtcagactcctgggtgagaacatgtgtttgatggatgtacatgtcaaagaaaatttagataacgcagaggacaggctgggtgcggtggctcatgcctgtaatcccagcactttgggaggctgagacgggtggatcacctgaggtcaggagttcgaggccagcatggccaatatggtgaaacccccgtctctactaaaaatacaaaaattagccgggcgtggtggtgcacgtctgtaatcccagctacttgggaggctgacacaggagaatcccttgaacctgggaggtaaggttgcagtgagctgagatcgtgccaccgcactccagcctgggtgacagagtgagacttcgtttcaaaaaataaaatttttaaaatgcagagggccatcctgggcaacatggtgaaaccctgtctacaaaaaatacaaaaattagctagggctgggcacagtggttcatcccggtaatcccagcactttggaaggccgaggtgggcggactgcttaatcccaggagtttgagaccatcctaggcaacgtggcaaaaccccatctctacaaaaaatagaaaaattggccgggcatggtggctcacgcatgtaatcccagcactttgggaggccgaggcgggcggatcacgaggtcaggagttcaagaccagcstggccaacacagtgaaaccccgtctctactaaaaatacaaaaattagctgggcatggtggcgggcgcctgtaataccagctatttgggaggccgaggcaggagaatcacttgaacctgggagatggaggttgcagtgagccaggatggcgccactgcattctccagcctggacgacagaggtagattccgtctcaaaaaaaaaaaaaaaaaagaagaaacattgctgggcgcagtggctcacctctgtaatcctagcactttgggagaccgctgaggcaggtgtatcacctgaggtcaggagtgagaccagcctggccaacatggggaaccctgtctctgctaaacatacaaaaattagccgggtgtggtggcgggcacctataatcctagctacgcgggagggtcaggcaggagaattgcttgaacccgggaggtggaggttgcagtgagccgagatcacactattgcactccagcctgagcaacaagagcaaaactccgcctcaaaaaaaaaaaaaaaaaaaagttagttgggtgtggtggcacatgcctgtggtcccagctacttgggagcctgaggtaggaggattgcttgagcccagaagttcgaggttgcagtgagccatgatcatgccactgcactctaacctgggtgacagagcaagaccctgtcttccaagaaaaaaaaaagggctgggattggtggctcatgcctgtaatcccagcactttgggaagtcgtggtgggcaaactgcttgagcacaggagttaaagaccagcctgggcaacgtggcaaaaccccgtctctacaataaatacaaaaatgagctgggtgtggtagcgtgcatctgtaccccagatactcaggaggctgaggttgggaagattgcttgagcccagtgggtggaggctgcagtgagccaagattctgccactaccctccagctgggtaacagagtgagcccctgtgtcaaaagaaaaaagaaaatgcagagagatcagagaaaaaaaatgggtttgtgatcctgttattcagagacagaatcaccctcttccctctccactccccataaacacaaccacagtctcacgtacactggggtttaggaggcgggcggacggcaccgggcctcttccatggtgggagaacatcttacttaggttgattcaggtgtcctcagcctggctggcagagagcagagacgggagcaggcgcggcagggcaggcggcactccctgtttgagagtagaacctacatttgtttggggttagctggcagagaggctgatgacatcgtgaactggctgaagaagcgcacgggcccggctgccaccaccctgcctgacggcgcagctgcagagtccttggtggagtccagcgaggtggctgtcatcggcttcttcaaggtagagaccagagcattccagtctyccttccttccgtcatccattgaggaggggtccacagcctgcagctggcagttctgcacgtgtcccccctggcctgrgctctacagggtctgccctactgcttggtgctgcgggatcatgacgacctctgcttctccctcctcattcaggacgtggagtcggactctgccaagcagtttttgcaggcagcagaggccatcgatgacataccatttgggatcacttccaacagtgacgtgttctccaaataccagctcgacaaagatggggttgtcctctttaagaaggtgagtggccccaggcagctctgcccaggttagttctggggttggtctgcagagggtggcgttgctctccttatcgttaagggaaccttgctcctggcacctttggcccaataggtatgttctgcagctttgccaagttggggtgttgcgctgatgcctgtggcctggtcttcgcattcagctgtgggccttctggccactctcctgccacagccgcctcagaactgcttttgactgttagcttttttttttttttcaattatgataaaacatgtaacaacatttgccctttttttttttttgggagagtcttgctctgtcacccatgctggagtgcagttgcgtgatctcggctcactgcaccctccgcctcctgggttcaagtgattctcctgcctcggcctcccgagtagctgggactacaggcatgcactaccatgcccagctaatctttgttttagtagagatgagatttcaccattttggccaggatggtatcaatctcttgacctcgtgatccacccacctcagcctcccaaagtgctgggattacagatgtgagccaccgcgcctggccccgtttgccttttttttttttgagatagggtttctcactctgccgcccaggctggagtgcggtggtgcattcttagctcactgcaacttctgcttcccaggctcaagtgatcctctaacctcagcctcccgagcagctggaactacaggcgcgtgccaccacgctgggctgagtttttgtattttttggtagacatggggttttgctgtgttgtccaggctggtcttgaactcctgagctccgagtggtctgcctgcctcagcctcccaaaatggtgggatcacaggcgtgagccaccgcgcccggccacgttttaactattctaaagtattaactacattcagagcgtcctgcagcatccctatttccagaacgttttccttacccagaggtctggagtattggcgctctgggcgtgttcccacccaggtggcacccacacttcgtatgcccctcagccccaagggcattatgacccctaaggatccactgtgaaaactgccatcctgatcccgctgtccttctcctggggaagggctcctggacagtgtggcctcttagccgcctctccccgttaccaggacacagcagggtccttgtttgcacagtgtcaagatggggcctgtgggtttctattgtctcttttctcggtcaccaggcaggtggggctggggccgcacacttgtgctctagggacagctgaacctggatgtgggtgatggtgggtttgtgccgctcagagccagggtagtgtggataggagagaaagtctcgggagaggagggacctggggagtgaggggcaggagggcggccgggggcgatcggaccttcagctcctgtcctgtgtcgtttccagaggggagaagaaccttttagacagcagcatcataagccaaacggtcagacgggcagcctctgggattggggctgagtggttttggacacaaggaacccattcactttctttttttttttctttttctttttttgagacagagtctgtctctgtcgcccaggctggagtgcagtggcgcgatctcagctcactgcaagctccgcctcacgggttcacgccattctcctgcctcagccycccgagtagctgggactacagggcacccgccaccacacccagctaatttttttgtatttttagtagagacggggtttcaccgtgttagccagggtggtctcgaactcctgacttcatgatccgcctgccttggcctcccaaagtgctgggattacaggtgtgagccaccgacccattcactttctgtagtaagcacggagcatccagcactccccgggaccaggtaggagggagggtagagccagcttcctggagcgcggtggtgcgggtgggtcaggatggcttgcttccatgttcttgttcttgtcatttagctgtttttgcagccacttcctcaagataactcaagacagtagatgctctttaccaggagacattctcttgatgtcccctgaagggaagagagttgctaaattagtctattgccattgcaaggtgcccaggaaattaaacctctgactagaaaaagccagtgaagtgttggataaagttgaaggaaccaaaggtctttttagagcttttattaaagagaaagttccaagtcttgtcctgaaacttgggttctggggcagactttctccagagcccacgaaactcgcgaaccctgtgttgtcacacagcccacagctccttcagtgccctggatgtctgcagtggccgctgtgactctatggacagtttggtgatatgtgtccgcgaaggcygggagggtggtttcgttgctcttgcctgcaaaggctcacacgtggccatccatgtgggctccccacaggttaacgttctgtctccattctctggagtccactagagctgggcacagacaaacccacttgggtttgatgccagttggtgggtggcgctttcctgcccactgaaggtggcycaggtgtctgtgatggcgaacgtggtcgttgcaggcagctccgggcagaagcccggccccctgtccggtgcacgtggtaggggctgccctggaagtcagagctcaccccgcagctgagaggatgagtccaacttgttccttttccaccaggctgttaacccccatccctcaaagtgagtgaggccttcctgtgtgtgcagtggccacagtgggcagcctggctgagtcgggtgctcttgtgtggcccgctcttgcctgctcttcccttccttccctagcaggcactgcaacccaggaaaacctctgcgggggctgctggtcactggcaccatgggtgtgagagcttctgatatttcactttttcttctcccccagcyggcagcactgggcctgttattgttgtttgagaaagggtctcgctctgttaccaggctggagtgcggtggcacaatcacacttcactgcagcttcgacctcctgggctcaagcagtcctcccaccccagcctgctgagtagctgggaccacaggtgtgcaccaccgcacctggctattttttaatacttctgtggaaatggggtttcaccgtgttgcccaggctggtctcgaacttctgagctcaagcaatcctcctgcctcagcctgccaaaacattggggttacaggcgtgagccataccacccggcctgcattgggcgtttctatgctgtttgtcaccgtggcctggcagggctggcctcctgctgctgtgccctgctaagtggaccagtttcccttaccgcagtagaccgtgattgagtgtggtgtagcatctctgctgaaacgatggcagccctgggacagctgcggcagtgtctcctcctggcttcttggcatgagatggtgtaggcggcgcctgacactctggagggagtcagagacattgttctgcaggggtggggggatttcgtttgcctgcagttgcggcccggcgttactcctgggcacagtgcgagcccacccgtgccactgggagcacggctgtgatcagcagctcatgttccaaaggattccctccaagggcctcctgaacttggcttttctgcctctccttacccgcctttgcccctctggggaagaggtagcaggcttagaagcctctgcccctcgggttcgggcagggtggttggtgcttgtgccctggtttaacatcagctccttggcagtcaggccaggccagggtggcccaggcacagcgtgcacaagagcagggagtggcacctggtctctaagttactctgcagacgcatacatggaaacggccagtaagaaaggatgygtgatttatttccccaagtctcatttaagaagtttgaggaggccgggtgcaggggctcatgcctgtaatcccagcactttgggaggctgaggtgggcgggtcacgaggtcaggagatcgagaccatcctggctaacacggtgaaaccccgtctctactaaaaatacaaaaaattagccgggcgtggtggcgggcacctgtagtcccagctactcaggaggctgaggcaggagaatggcgtgaactcaggaggcggagcttgcagtgagccgagaagcaccactgcactccagcgtaggcgacagagcaagactctgtctcaaaaaaaaaaaaggttcaaggggaccaggcttggtggctcacacctgtgatcccagcacttagggaggccaggacaagaggattgcttgaggccaggagtctgagaccagcctgggcaacatagtaagactgtctctacaaaaagtaaaaataaaataaatttttttggctggacacgctggctcacgcctgtaatctcagcactttgggaggccaaggcgggcagatcacctgaagtcaggagcttgagaccagcctgaccaacatggagaaaccccatctctaataaaaatacaaaatttgccaggcgtgttggcacatgcctataatcccagctacttgcgaggctgaggcaggagaattacttgaacccaagaggcggagattgcaatgaggcaagatcgagatcgtgccattgcactctagccagggaaacaagagcaaaactcagtctcaaaatagataaaataaaataaaataaattaaataaataagtattttaaaaagtagttctgtccaggtgcagtggctcacacctgtaattccagcactttgggaggccgaagcaggccgatcacctgaggtcgggagttcaagaccagcctgaccaacatggagaaagaaactccatctctactaaaaaaacaaaattagccaggcgtggtggcgcgtacctgtaatcccagctacttgggaggcagaggcaggagaattgctttaacccgggaggcagaggttgcagtgagccaagatcctgccactgcactctagcctgggcaacaagagtgaaactccgtctcaaaaaaaaaataaaatagtttgggccgggctcagtggctcacacttataatcccagcactttaggaggccgaggcaagtggatcacctggggtcaggagttcaagaccagcctggccaacatggtaaaaccctgtctctactaaaaatacaaaaattagccaggcgtggtggcgggtgcctgtgatcccagctactcgggaggctgaggaaagagaattgctggaactcgggaggtggaggttgcagtgagccgagatcatgccattgcactccagcctgggtgacaatagcaaaactccgtctcaaaaaataaaaaaataaataaattttaaaaataaataaaaaagtagttcgggggaatgatggaaggctcacccaaaattctcacttgaagagcctcagcacaggggcgcctctctgagcctgagccgaggccgcatcctcagctgcaggctgacccctcgtggttggggcgccacagcctctccatcttgtggccttaggactccctgaagctgccgtgcattattaggggtccccagggccttacaggcacgtggattgcgcctttcaggatctgttgtattagaaactagaactaagaatgtaaaaaatcgtttttttctctctatttatttttattttttattttttgagatgaagtcttgctctgttgccaggctcgaatgcagtggcacgatctgggctcactgcaacctccgcctcctgggttcaagcgattctcctgcctcagcctcccaagtagttgggattacaggcacccgccaccacgcccagctaatttttgtatttctagtaaagacgacgttttaccatgttggattaggctgctctgaaactcctggcttcaggtgatccgcccgcctcagcctcccaaagtactaggattacaggcgtgagccaccacgcctggcctgtttcactcgtcacccaggctggagtgcagtggtgcgatctcactgcaatgtctacctcccagactcaagcaatcctcctgcctcagcctcccaagtagctgggattacaggcaggtgccaccatacccaactgatttttgtatttttgtatttttttttttttttgagacagagtcttgctctgttgcccaggctggagtgcagtggcacgatcttggctcactgcaacctctgcctcccgggttcaagtgtttcttctgcctcagtctcccgagcagctgggattacaggtgtgcaccaccacacccagctaaatttttgtatttttggtagagtcgaggtttcaccatgttggccaggctggtcccaaactcgtgaactcaagtgatccacctgcctcagcctcccaaactgctaggattacaggtgtgagccactgcacctggccttttttttttttttttttttttttttgagacagagtttcgctcttgtcgcccaggctggagtgcagtggtgcgatctcggctcaccgcaacctccgcctcccgggtccaagcgattctcctgcctcagcctcccaagtacctgggattacaggtgcccgccaccacgcccagcttatttttgtatttttagtagagatggggttttaccgtgttggccaggctggtctcgaactcctggtctcaagcgatccacccatcttggcctcccaaagtgctgggcttacaggcctgagccactgtagccaaatttattttaaaagaataataatcccattacatgttatcataaatcacatctttacggaaactagtttgtcccagacaaaaacaatttagtgctgagtgatgttttagattcctccagcaggattctcctctcctgccctcctgctcttgcgacaccatgcgcccagcagcctctgtgggtctgtgccgcagcacgtgagagggagagtgaaaaggcagaggccagagaagtgtgagtgtgaaaatagctttgaccagccgggcgcggtggctcacgcctataatcccagcactttgggaggccgaggcgggcagatcacgaggtaaggagattgagaccatcctggctaacgtggtgaaacccatctctactaaaaataccaaaaattagccggtggtggcgggcgcctatagtcccagctacttgggaggctgaggcaggagaatggcttgaatccgggaggcggagcttgcagtgagtggagatcacgccactgcactccagcctgggagacacagcaagactccatcacaaaaaaaaaaaaaaaaagatcaagaccttcgtggccaacatggtaataccccatctcgactaaaaatacaaaaaaaaattagccaggcatggtggcaggcgcctgtagtcctagctactcgggaggctaaggcaggaaaatcacttgaacctgggaggcagaggttgcagtgagccaagatcatgccactgcactccagcctgggcaacagagcgagactgtctcaaaaacaaataaaaaagaaaatagctttgaccacatgggtgccctgaaaaggctaggggccctggggatgggccacacttcaaggttgctggaggaccacgtgcgccaggcttgcattgtggatgtgaagccagctgttgaattcacgggcagccataaggccgtgaccagagccagtcttactgtcgaggaacagccatgtccygtacccattgctggacctgtggctcgaaaccccacgggagggcagggctgctggctgctgtgacttcccacgtccagggagacccgggcccaggggctgtgctcccagcagcaatgctcagtcagggccctctttctgtccacagtttgatgaaggccggaacaactttgaaggggaggtcaccaaggagaacctgctggactttatcaaacacaaccagctgccccttgtcatygagttcaccgagcaggtgcggctgccctgcagcccccaggctggggatggggaggagtgggttgggggtggcatgaggctcccggtcaccactgctgtccagcgtctgacattggaggccrttgggagaaycttctgcattaatagtgtgtgactcagacccagtaacttaagtttataacacagacagccccgaagatttttggaggtgaaatcaagactcacatcctgctgttcttgcccaagagtgtgtctgactatgacrgcaaactgagcaacttcaaaacagcagccgagagcttcaagggcaaggtgagctgctcttctgggtggctcgtggggcggtgccagggagcagtacaactcttcccgaggtgacaagtgtggggccttcctgaggctgcctgctggacyggatcgggcacctgattcaggacagcctggatgtaggcgaggggccagccaggccagacctctgctcccagtcacctgctggtctggttgggcaaccccggaatccaggttggaggaaaaaggcaccggagcacggtctgcttccgagcaaagtcagggctggaggcagaggccagccgtctcccrcacctgtgcaacctccttttctcccccagatcctgttcatcttcatcgacagcgaccacaccgacaaccagcgcatcctcgagttctttggcctgaagaaggaagagtgcccggccgtgcgcctcatcaccctggaggaggagatgaccaagtacaagcccgaatcggaggagctgacggcagagaggatcacagagttctgccaccgcttcctggagggcaaaatcaaggtgcaggcgcgtccccgggccagggctgcctcccgggtagagccgccaccttggggtctctgggctctcagtgtcctgggcttcgtcctcaaagtaagatcttcagagtaagaggacggagcccaagatggtgtgaagaccaccattcttgtcacacctttggggacctgtaggagccctcttgtccacacggctggcccagatgctcctcagggaaacctcctggccggcgagggtgcggcctgcgtgggctcattgggcccagcccactggcccagccttctctttctggattcttggcactgttggtgtctgyggctgccaccctggtgtgcccagggcagccacgcacctcagtcccgggcagggtgagggttggggagctctgtggtcccccaggcatcgccgcccctcaccgtgccctgcctgccctccagccccacctgatgagccaggagctgccggaggactgggacaagcagcctgtcaaggtgcttgttgggaagaactttgaagacgtggcttttgatgagaaaaaaaacgtctttgtggagttctgtaagtgttgccctttcagctccccaggtccgtgccaccagggcacgcgcaaggtaggcagactcctggggaagcgtctgccagtggctttgtgtccaggacacaccctagaactgctttcttttcagatgccccatggtgtggtcactgcaaacagttggctcccatttgggataaactgggagagacgtacaaggaccatgagaacatcgtcatcgccaagatggactcgactgccaacgaggtggaggccgtcaaagtgcacagcttccccacactcaagttctttcctgccagtgccgacaggacggtgygccttccctccagacggggctggggcgggctctgggaagagcagtggtccccacgccagcctgggtgcctctctggaaggagcctggggctagtcaggtgggagaagagctgtgggagctccttcagaagcacccacctttgtttttcgagagagatgggatctcactatattgcctaggctgtttttgaactcccaatgtgctggattccgggtgtgagccaccggaccgggcctgctctgcctttctctagggaggaggagccaatgccaggagattggctctgggccgggaccagcccctgcactcatccctgtcttccacaggtcatygattacaacggggaacgcacgctggatggttttaagaaattcctggagagcggtggccaggatggggcaggggatgatgacgtgagtggggtcacagccctgggctggtctctgggattcagccccttggccccacgggacatgcccacttgggctcggcttgtgatgggaatggtgccattggaggcacgtctgtgcgtccagggctctggggccccacaccttcgcccagcagggcaagggatgtgctcccagtgctctgctgaaacagctctccctggccagcacttctttaggggacgacgttgaaggcatctttaaaaaccagattttgcttagaaaaccttttcagacacatggcaccggttcctcacatgctgctaacttggactcagaggtccatccccagcccgctggcggggcccgggcacaagggcgcagacatgggtctgccctcgggagtttagtcctgcccgtcagcgcgtggccagcagcagtggtgactctgccggggaagcaggaaggctggtgttgggaggatgcggcaggggcggggtgcttgaccatggtgaaggagatgagggcatggtcagcccaggctggcagggcctgctgggagtgctggtgcacagtgggaggtgggaatactctgcccaggctggggatggagggccggcccctggtgctgcctgtggcctgtcattggccagagcccaagggttggaagtagaatggtcacaccccagtggtgactgtgcctggacttcatgctggggctgttgtccctgccgagatgtggaccctctgtagactccatggtgccaagctgggagacacacatacgccttccatgcccagtggaagggtccaaggctgagctgggattcccagggttcctgacacagtgggggctctgattcatcctgctataggcagaaatcccccaggcgtcactcttcctgggaagacccctgtgtagctcgtaaagaccagggttggctgctccagtggccggtggccattgttccgccgtggccggctagtccccggtgtgagcagtgtggggtgctgggggccggcagcctcagctgttgcagccaacctgcccgccccgccccttttcctgtatcccaggatctcgaggacctggaagaagcagaggagccagacatggaggaagacgatgatcagaaagctgtgaaagatgaactgtaatacgcaaagccagacccgggcgctgccgagacccctcgggggctgcacacccagcagcagcgcacgcctccgaagcctgcggcctcgcttgaaggagggcgtcgccggaaacccagggaacctctctgaagtgacacctcacccctacacaccgtccgttcacccccgtctcttccttctgcttttcggtttttggaaagggatccatctccaggcmgcccaccctggtggggcttgtttcctgaaaccatgatgtactttttcatacatgagtctgtccagagtgcttgctaccgtgttcggagtctcgctgcctccctcccgcgggaggtttctcctctttttgaaaattccgtctgtgggatttttagacatttttcgacatcagggtatttkttccaccttggccaggcctcctcggagaagcttgtcccccgtgtgggagggacggagccggactggacatggtcactcagtaccgcctgcagtgtcgccatgactgatcatggctcttgcatttttgggtaaatggagacttccggatcctgtcagggtgtcccccatgcctggaagaggagctggtggctgccagccctgggbcccggcacaggcctggsccttccccttccctcaagccagggctcctcctcctgtcgtgggctcattgtgaccactggcctctctacagcacggcctgtggcctgttcaaggcagaaccacgacccttgactcccgggtggggaggtggccaaggatgctggagctgaatcagacgctgacagttyttcaggcatttytatttcacaatcgaattgaacacattggccaaataaagttgaaattttaccacctgtccttgcctcgggtttatgatctcaccaagcccggagagctgggctggaatgcggacgccaaggccatctgccaggccttagtggggttactggtgctgagaggcctcgcccctgggacgaggtgcagatgcagaaacaggccccagtctccccagcagagctgtgcaggcttgcgattcccggggaggatgccttccctgcctgtaggctgctttacctggactctgatggggcttctgtgattctggaccctggatgtggacacgggtggagccacccagccccatgtgatgctcagactcctggtcattccctcccatccccgccgtggagtgacgagaaatcaggtggactcaggcttcaaggatgggtgagaggaacagggggccctgcttatcactaacccttcacacgataaagggcagggctgggcgcagggacgcgcgcctggaatcccagtgctggggcaacacggggagaccccgtctctaggaaaaattagaaattagctgggcatggtttgcacctacagtcccagctactcgggaggctgaggcaggaggatcacttgatcccaggaggtcaacactgcagtgagcggagatcgcgccactgcactccagctgggtgacagagctgtctctaaaaataaggatctcctggtctttaagttgtaatttggcttaacctcagcactcctgtgcttcacatgcagaaaaaacacatacactcgattttttttgagacggagtcttgctctgtggcccaggctggagtgcaatggtgctgtcttggctcactgcaacctccgcctcccgggttcaagtgattctcctgcctgagcctcctgagtagctgggattacagacatccgccaccacgcccggctaattttttgtacttttagtagagatggggtttcactgtgttagccaggatctgctggctgacctcgtgatttgcccgcgtcggcctcccaaagtgctgggattataggcgtgagccaccgcgcccggctgaaagtcaatttttctgcagacggcaagccgcggcctgtgtgcagggctgggcgatggctctgctgagcctggatttgctgcttttctgcaggggaggcaacaggagctctgtggtgtctgtgggtccccctgagggcaacggcagaggccctgaggatccagcagggctcatggtggtctcagagggcggtgaggcaggaggaaggagcccaagggtgcaggtggcaggtgggagtgggggtggagctgcagctctagggaggctgctcggccctcagaagttcggatggaacaaacgaccctcaccaggctgccttgaggagccctgcctgtgactctgtgagccccgccaacttcacatcctgatgtgcttcctagagtaggagcttccgcactgccgagattcccgggtgtcctcccagttcccgagcttgcgggctggctgcagctgctggagccagagacggctctcaagccagaccaggcctcgccgggggtgcggttctcccgttctccccgctacctcccttgccggccccacaggccctcacaaactcggccgctccggctcctcctgcctcygctccaggctgtggagtatccggccagcatgccgcgaggacctgtgtcaacacgtcgccagcaccagccagcccggtttgcccacatgtccttggccccacacggctcacaccagctcggcagtctgggtgctgccgtctgccccggcccccagctctgtgggtcttggagacagccygtgctggggctggtttctggctagttcagctccagggcctcagcagggtttgtgtgccatgcctgggtcctgcgacacagtgagccgcgtactcacggaaaagtgggcaacggcatctggaggtgccgtgggaggatgtgggcagaggcccgagggctgtggctccttgcagggtctctgagggaggctgtcctgagtcacagctaaaggggtgggctgtatttgtgcctgtgctccctggccgtgggatggggtgcagtgaccctgtggaccagctgtgcggggagccggccctctggagagaacgttgggacatggcrcagctgcccgcagcactggtgtcatgtgctctggaaaggggagggagtcactgatacctttcccgttttgcagaggcagctgatgagcacattcctgggctcggctgtggctgggaggtggtggggcagtgtccaaaacctctctgactgggctgctggattagtggggagactttgaaggctctgggaggaggtggttagggcttagcagcctgggacttcccaaccctctgtctctccaggtgccaggaagccaccggcctggagcctaaaacagtgattgctgggtctatgtaccacaccccggggggcctctgacctcagggagggaagggcccttctggccctaggctggccctcctgccagactgcagtgcgacctgcgctgacttttccttttttttttttgagacatagtctcactctgttgcccaggctggagtcagcgctgcgatctcagctccctgcaacctctgcctcctgggctcaggtgattctcctgcctcagcctcctgagtagctgcgattacaagcatgcaccaccatgcccggctaatctttgtattttcagtagagatggggtttcaccatgttggccaggctggtctcgaactcctgatctcgggtgatccacccaccttggcctcccagagtactgggattacaggcgtgagccactgcgcctggcctcagctgactttactaacagggtctcccgggtgcttttgcagagcactgctggttgcattcactggacatttttttttttttgagacagggtcttgctctgttgcccaggctggggtgcagtggtgtgactgtagctcactgcagcctcaaactcctgggctcaagcaatcttttgcacctcagcattctaagtagctgggaccataggcacccagtaccatgcctggctaatttttaaattttttgaagggaagggggtctccctatgttgcccaggctggtcttcaactcctggcttcaagtgatccttctaccttggcctcccaaagtgctgggattacaggcgtgacgttctgagcccagccaggcctcactggacttctaaaagttggacggtaggccgggcgcggtggctcacgcctgtaatcccagcactctgggaggccgacgcgggcggatcacggggtcaggagatagagaccatcctggctaacacagtgaaaccccgtctctactaaaaatacaaaaaattagctggacgtggtggcgggcgcctgtagtcccagctaccccggaggctgaggcgggagaatggcgtgaacccgggaggcgaagcttgccgtgagcccagatcgcaccactgcagtccagcctgggcgacggagcgagactccgtctcaaaaaaaaataaaaaaagtgtgatggtaaaccttgtgcatcagatgttctagttcgtcctccagaaggcagaaacttagagtcatgcaaactaggtcaatttgcaagttcatatggaccaagaagaatcagggacaaaactccatgaagacaggtttggctctgacgtcacgctgcatgaacagcacgcttcgcccacggtggagcaggcacgactgctgacggccggcttctgatggaacgtttcaagggtgaggagctccagggagtgtctatcatggcgtagaacacacggttcccacatccttattagaatagaaggcacataaatacctttcaaggaaatctgttgtgactggcgaggcttcaggcaccagtccctcgggtgatccagatagaaaccccaaagccaaaagctctgcacgctcccagctcacctccagcaggagggacacaggggcttgcttggggtcgccaaacaggctcaccgggtggtcttgcccccaccgcgtctctagcctgaggcccggtcactcctggaaagggcgttccttctcgtcacactgttggtggcagcttcatccagcgtgctttcatctgatcctctgaggggggagggcagacagaactttccacaacatgagaaaaggcaatcttcacatcagaggagagcctgtctccagtgtacaacgtttcgtctccaggcttcacgtaaacaagccagaaaaaacggcctggctcctcccaagtgacctggaattccaactgtccatacctttccctgagtccctagaaatgcagccacgctgggagccgacccccctcagggtgtctgcaggcccgggcctggctagaggctccagggccactccagtgtgtgactggagaggtggtgtacccgaggcgaggggcccagggggcaggggaggggacagggggtgcacctgggtaccaacgcaggtccaggaaatttcgccaggcagggaccctccgtcagcgccgcttctccagcagcatttttccttttactctttttattttattttttaaattttttattattattatttttaagatggagtcttgctctgtcgcccaggctggagtgcagtcgcgcgatcttggctcactgcaacctccgcctcccgggttcaagagattctactgcctcagcctcctgagtagctgggattacaggcgcacgccgccacatccggctaatttttgtatttttagcagagacggggggtttctccatgttgtccagactgatctcgaactcctggcctcacgtgatccaccctcctcggcctcccaaagtgctgggattacaggtgtgagccactgcacccggccagttttaaatttttttaaagcaaaggagtctcactatgttgcccaggctgcttaaacccctcgcttcaactgaccctccagccttggcttcccaaagtgctgggattacaggcatgagccactgtgcccagccctcccatagcatttggccaaggctttgcacctagaggtgtctaatatgtttgctgatttgatttcgttggatgcagatcagcctaatgatgcgaggctgttggtggcccagctctcctctgcccctgcaaagagctgctggccagtcttggttctgtcctcattcaggcctttagtgaccacctgcagggttttaccagcattatgggttgactcatgtgtctccttaattaacgttgaagtcctagccctcaagacctcagaatgtgaccgttgtttggaaacaggatgcttgcagatgtcactggttaagatgaggcaatacccaactataactggtgtccttatacaagggggtgatgtgaacagtgacaaaggctgggagaacaccatggagatgaaggccgagatcgtggcgatgctgctagggccaaggacaccaggattgctggcggcaccagaagctggggagaggcttgcgacagacgctcctcagagcctcaggaggaacctgccctgctgaaacccggatcccagatttcagcctccagagctctgggacggaccgtcttttttttttttttttttttgagacggagtcttgctccatccccaggctgtagtgcagtggtgtgatgtcagttcactgcaacctccacctcctgggttcaagcaattctcctgcctcagcctcccgagtagctgggactagaggcgcctgccaccacacccagctaatttttgtatttttttttcccgagacagagtctcgctctgtcgcccaggctggagtgcagtggcgcgatcttggctcactgcaagctctgcctcccaggttcacgccattctcctgcctcagcctcccaagtagctgggactataggcgcctgccaccatgcccagaaaattttttgtattttttagtagagatggggtttcaccgtgttagccagatgktctcgatctcctgacctcgtgatccacctgccttggcctcccaaagtgttgggattacaggcgtaagccaacgcgcttggcctttttttttgagatggagtcttgctctgtcacccaggctggagtgcagtggcacgatctcggctcactgcaagctccacctcccgggttcacgccattctcctgcttcagcctcctgagtagctgggactacaggcgcccgccaccacgcccggctaattttttttttttttttttgtatttttagtagagacggggtttcactgtgttagccaggatggtctcaatctcctgacctcgtgatccacccgcctcggcttctcaaagtgctgggattacaggcatgagccaccgtgcccggcctaatttttgtattttttagtagagaaggggtttcaccttgttggtcaggctggtctcgaacacctgacctcaggtgatccacctgcctcggcctcccaaagtgctgggattacagggttgagccaccacgcctggccaaccatctgttttttaagccactcagtctgtggtctgtgaagacagccccggcagactcatccatccagcttcaagtgctgcagtgctcctagcacaatcgatcgctgtccctgacaacaaagacctccctggtcaactctgtgtctgtgtcccatcccatccacttgctcatgtcctgtagtccaagccctactttggacctccactggggctgttgcaaaagtaaaggcagccagcaatgaagagcctgttggaacacgagttttaaaaattcccttggctgggcgcagtggctcacgtctgtaatcccagcactttgggaggccgaggcgggcggatcacaaggccaggagtttgagaccagcctggccaatatggtgaaaccccgtctctactaaaaatacaaaaattagccagacgtggtggtgcatgcccctgtagtcccagctactcgagaaggtgaggcaaaataattacttgaacccgggacgcagaggttgcagtgaaccgaggttgcgccaatgtagtccagcttgggcgacagagtgagactctgactcaaacaaacaaacaaaaaaattcccttggctgtgcttctagaggtaagatcacaggggccggggcagagagagcacaccacccagggtgtgatggtccctgaacgtggagagcaaactggacaccaccttaagtgtgagtatgtgtgtcaaacctggaatgcagagacactatgcagggtgaacccatgagtgtgtagggaataccctgtcccctgcaggtgtgtgaggcaggggagccaggcacgtggaggaaaagtcgcaggactgactgagcaggagcctgaggcactgagatcccagccaaggatgcctgcggggtttctgagcaggaggcagcaccatcagagtcattttttttttttttttttttttttttgagacagagtcttgctctgtcgcccaggctggagtgcagtggcacgatctcggctcactgcaacctccgcctcccgggttcacgccattctcctgccccagcctcccaagtagctgggactataggcgcccgccatcacgcccggctaattttttgtatatttagtagagacggggtttcaccgtgttagccaggatggtctcgatctcctgacctcatgatccgcctgcctaggccatcagagtagttttgggaaaaccactgagagtgaggcaagccacgctggaaggtgaaaactgacaggtagggagatggaggggctaaggcctgtttcaccacagcacggtggacctgtgcttctgcagatgtggagggggtggccgcccctcactttccaggaggtagagagcaaaagcccttccaatgaccttggtacctactgtgcccttgatctcgcgttcctagctatctcatgggttctgcaccggtgcctcctcctgccctcggtaaggcaccttctaggtccagctgtggggcagggagcgacaggcaggaatgatctgacccctttggccgggcacggtgacagatgggctgaaagatgagtcactaaacatgatctggggtgcggggcgggggtgcagctcagtttcagcccctcgcgccggggaggatgaccgtgcagctttatatagcccctgagccctatataagcaagtcagaggccggggctcgtccgacaggagccctcaagctgatctggtcgggaccggatacattattaaccccagtgcagtagggtccccaggggcaacctgccccacagcgcccaagatgcctagcagaactgcccgctatgcccgctacagcccacggcagcggcggcggcggatgctggctgatcgcagcgtgcgtttccctaatgatgtcctgttcttggaccacatccggcagggtgacctggagcaggtggggcgcttcatccggactcggaaagtctcccyggccaccatccacccctcaggtgagcaaagcctggaagagctggccagggcctgtggggtggtgggagaggccagcaaggaggacctgacctggggctcagtcttgacccctcccgtcctccctgcccaggcctggccgccttgcatgaagccgtgctctctggaaacctggaatgcgtgaagctgctggtcaaatacggggctgacattcaccagcgagatgaggcgggctggacacccctgcacattgcctgcagcgatgggtaccctgacatagccaggtgagggggccctgggtctacacaggcttgaacccgacccctccgggcctcagtgggtccccaggatgggagccccaaaatgtagcccgggtggtgtcggcaagaaccctagaggctgggggcggtggctcacgcctgcgcctgtaatcccagcactttgggaggccgaggtgggcggatcacctgaggtcaggagttcgtgacaagaaccctctcactactaaaaatacaaaattagccacgcgtggtggcgcgcgcctgtaatcccagctactcaaggctgaggcaggagaatcacttgaacccgggaagtggaggttgccgtgagtcgagatcatgccattgcactccagcctgggtgataagagcgaaattctgtctcaaaaaacaaaaaaaacaaaaaaagaaccctgcaaaccctagaggcttctggaatcctgtttctgcctttgtcctcaatagaaccaacttgaaaagctggccacagcttccaaagggtcaggtttcttcctcctcaccctacccggaccttaggaccccaaggtgggggacacacaggtgaccccaggactctggccctctgaccygggttggggcgagcactctcctggctcctccccgcttcagccagagcgacctttacaccccaggtaccttatctccctgggagcggacagggatgcaaccaacgacgatggcgacctgccctccgacctcatcgacccggactacaaggagctggtggagctcttcaaagggaccacgatggactgagccagctttgcccgcccgcccccgcgcccagggccgcctccctggagaagccgcgcgtcgcccatgggccagcacgtgccccacccgtgggccaggggcggccggacccgtccctccacgaccccgccacccctcctaggcctggctttgtccccaggtgaattttttactgtgacactttttactttttcaataaacgtgactcccaggtgagggggcctgggtctacacacgtggtccctgtggtggtgtcctgattactgggctctggccgctcccagtggccggcggcgctcaccgttcgggccagggaggtccgg

SEQ ID NO: 96158 - DNA, 29672 bp, Homo sapiens
agatcgcaccactgcactccagcctggtgacacagtgagactgcatgtcaaaaaaaaaaaaaagttatctattttctcatatatgcatttttaaaagctatttacagtggttatcttcaaaagtcttttatttttgcttacacatttttgcatactttattacagatgtgagccactgtgcccaacccgttttaacatttaatagtgaaaaaatgatatatttctgtttcctccacactaatctttaactattacaaactgtagtttaatggaatcctgatttttaccctctagtttggattcagtgtttctaacttgaagtttttttgttttttttgttttgttttgtttttttgaccagacccccaggacttgtttccttctgtgagattcaggccaaattggtttcaaaagttgttttgcttcaaggaatagtttttccttatctactgctgcagtgattccacaaacagaaacttctaattccttctgtcaactcctccaaatttcgtgactttatggggggcagggaagggactaaaaatctcagaagaaagagctttataccctttgcctctagacagagcaaaaccaagaccttccagagagggagcgccacctgcagctgaggctatttatagtacaggagttggatttaaatataattctgtcctctggtaactccagccagctgctactttaagatttggcgccgccctttatgtaagagggcatgttttgtttcagtacctttcagatggaatcgaaatttagcagtaagcaacaaacaagctctggtgtgggccactggaagtgagaagcagtgtggtggcaggaggctggctgtgcaaccttggcgtgaggactagaatggatttaaaatagtccactccttgagtataaaatggtacaggctctgcagaaaacagtgtgtcagttcctgaaacaatcaagcatagaattatatgatccaggccaggcacggtggctcacacctgtaatctcagcactttgggaggccaaggtgggtggattgcttgaggtcaggagttcgagaccagcctggccaacatggtgaaaccccgtctctaccaaaaatacaaaaattagcctggtgtggtggcgcctgcctgtagtcccagctactcgggaggctgaggcaggagaatcacttggacctggaagacggaggctgcagtgagcagaggtcaagccactgccttccagcctgggtgacagagtgaaaccctgccacaaaaaataaaattaaataaaattaaatatttatttgaaaaaagaattatatgatccagcaatcccacttctaggtgtatacccaaaacaactgaaggaagggactcagagaccaagaggtggaagcaagccaagtgtccacagaagaatgaatgggtaaataaaatgtggtatatactgtacatacaatggaatattatttaaccttaaaaaggagtgaggtggggcttggtggctcacacctgtaatcccagcactttcggaggccaaggcaagaggatcacctgaggtcaggggtttgagaccggcctggccaacatggtgaaaccccgtttctactaaaaatacaaaaattagccaggcatggtgatgcacgtctgtagtcccagctactcgggaggctgcggcacgcaaattgctttgaacccaggaggctgaggttgcagtgaaccgagattgccccactgcactccagcctggggtgacagagtgaaactctgtctcaaaaaaaaaaaaaaaaaaaaaaaaaaaaggaatgaacctctgatacgttacagcataggataaaccttgaaaacatcatgctaagtgaaataaacagacacaaaaggacaaatactctatgattctacttatgtgaggtagctaaagtagtcaaattcatagagacagaaagaatgatgggccgggggcaatggctcacacctgtaatcccagcacattgggaggctgaggtgggaggattacttgagcccaggagttggagaccagcctaggcaacatagtgagaccctcatctctgccaaatttcaaaaaattagccaggcatagtggcacatgcctgtgatcccagctgcttgggaggctgaggtgggaggattgtgtgagcccaggaggttgaggctatagtgagctgagatcgtgccattgtactccagcctgggcaacagtgcaagacccggtctctaaaaaataaaaaggaaaaaaaaataagaacagtggtttctgggggctggagggaggggaaatggggagctagtatttaatgggcacagagtttcaattgggtaagatggaaaagttctggagatggacagtggtgatggttgcacaacaatatgaatttacttaacaccactgaattgtacactttaaaaatgttaaagtggggagactgggcgcggtggctcacccctgtaatcccagcactttgggaggctgaggcaggcggatcacgaggtcaagagatcgagaccattctggccaacaaggtgaaaccccgtctccactaaaaatacaaaaattagctgggcgtggtggcgggtgcctgtaatcccagctactcgggaggctgaggcaggagaatcgcttgaacccggggggcggaggttgcagtgagccaagatcacaccactgcactccatcctgggcagctgagtgagactctgtctcaaaaaaaaaaaaaaaaaaaaagttaaaatggtaaattttatgttaggtatattttatgacaaaaagattttaaaaatccccccttcatcttcatctatattacccatctgtccatggaccctagaggaaaattgggagattgtcaatttaaccaaattggtctctggacctcattctcatcatgtgtgaaatgaaagagttggctggagtttccacaatttcatgtagagatgttgagtcagaagacaggagatgtggggaggtaactcttatggaaggtaagaagcacagcactgtagaaacgaatattgatgtctactggattttggaagtctgctacaggtcagacatctaaayttttgttgacaaattttttttaatttaaattagaaaacatttcaagcatacagaaaatccctacatatagcgattgtttaccaccaaaaactaacagatgttaatattttgccatatatatatatgatccgccagcctctgcctcccaaagtgctgggattacaggcatgagccaccatgcccagcctatgtgtcttgcttaataaatccattcctaccctgaattgataaagatgtcttttcaatctatgtctttttttctcttaaaaatttctgctctttttaaatttttctattttcttattttttttctttgttcttcagagcagatctactttctttgaattctataatctaaaatttttaattaactttttatttggaaataatttcaaacttaaaaaatgttgcaaaaataaaaaatatgcaaagaacactcacaggctgtttacccagattcacctattgttagcattttaccctatttgtttatcatttgaaatagataatatataaaacataccatatatcatatctaatatatattttttctggactgcttgagggtcagttatatacatgatgctttaccattaaatacttcagtgtgtatttcctatgaacagggatagtctaacataactacactaccattattaactttataactttatactcttttgaatctcctgtgatattccaattttgtcaattgccaatttttttgttaatgttgatgttctttatagcatttttataaccccatgccgccctataaccatttttcttttctttttttgttttttgagatggagtctcactttgttgcttaggctggagtgcagtggcgcgatattggctcactgcaaactctgcttcccaggttcaggtgattctcttgcctcagcctcctgagcagctgggattacaggtgcactccaccacccgcggctaatttttgtatttttagtagagacgggacttcaccatgttggccaggctggtctcaaactcctgacctcaagtgatccgcctgcctcggcctcccaaagtgctgggattataggcgtgagccacggtgcccggcctcaagccctataaccttatagcactttaaaaaaatccaatgatacagaatccaaactaagggcaggtgttgcatataattgtcatgtctttttaggtttctttaatctgaaacagttcctcaacctctatttgccttctatgacattgacatttttgaagaatgcagtcctccccacctttttaaatagaacgtttctcatttagtgtttatcttatgtttccttgtgattagatttgaaataatgctggaacattgccgagacgtattgtgcagcactgcataggtgtagtattatgtccttctcagggtatcacatctggaggcaaagaatgtctctctgcccctcatggttaattttgatcacttgcttaaagtattgccccatttctccactgtacaatgactgctttttattttattccccactcccttccaactcatggcaatctggagggagatactttcagaccctgcaaaagttctgctcctcatccaacatttcccccagctttagaatccactgatgattcttacctgatccaatctttgccaccaagtctgaaaatgattcatttaaaagtttttaagttttatttttcacatataggtctttgacctggaatagattttgtgtatggtgtgagatagggattgaattctattttccccccagatggctaatcagctccatttgttgaagtttattctttcccagttggtaagaaatgtccacgtcttcacacatttgctgtgtttgtttcagtactgtatattctatttcattggtccatttgtttatccttgtgccaaaactatgaagtctttattgccatagctttataatatatatttatataaatatataattgctgtcactacataatgtggatttatataaatatataatatataattgctatagctttatagtatatatttatataattgctgttttatatatcatataattatataaatatataattgctatgttttatatattatatatttatgtagatatataattgctatgttttatatattatatatttacataaatacataattgctattgctttataataaatttgtatatcttatagggcatcttccattatactcttctctaaaattgttagctattcttgccatccgggcaattatattcattttcacaacaaccctcagattaagcaattgcccaaggtccaaaaatcagcaagagggacttggaacccaggtctgtcggaggccaaagctcttttcattacttcctgagggtggttttctaggcatggagaagcagaggtcagggaatcaagtgtggcgagagagagaagagaagtgaaagaagaaaggcaggtgtcagcttggtgtgggtttggtctctgggatatagactttgccagccaaaggatggagcttgaacttagctggcagaactggaaacagaagattgtaaggaaagggactgggatcagtgtttcttctccaggacggattacccacagctgtccacgggcaggcacttgttactttctggctgagcagggcagtgtggccgacggctgaaaggggaagctgcggctgcttttgtgcaggggtggtggtgatgagggtgatgtggggggctggaaggcatggaggggaaaggatctggctgactacctggaagccaggacagatcccaccccagaaaggcgcagtaggggctctcatcctccactagcccgcccctccctacctaattaaggaccctaatcagcttggggagattaagggctctggccggctgtacccacgcccccgccctggcctgggctggcaaggaagacctgtgggcgggcgtcaaaagggggaccggccctgtgacccctcaccggggccgtgggcccgagccccggacttccctgtaagtgtcagaggcccctccgctgggatagggtcggtctgagggcgcaggcgagtccctgctgacccctgacgcctccgacggggggaggggcaggccgggtgggagcgggaagccggggcggcagaagggggcttcggggcggtgtccttggccccagttagtcttcccagcctccggagggggcggtagcagcagaatcatcccatgggttactcgggcttggagaaactcggggttacggggagaaccctaggggaggccggggtctcagtcgctcagcctgctccgtctgtgttcgcagaagccggcaatvaccgcctgcgcccgccgagcgggtgggcttccggaccccgggctctgcggtcccgcgtggtgggctccgtccctgccccgcctcccccgggccctgccccggctcccgctcctgctgytcctgcttctgctgcagccccccgccctctccgccgtgttcacggtgggggtcctgggcccctgggcttgcgaccccatcttctctcgggctcgcccggacctggccgcccgcctggccgccgcccgcctgaaccgcgaccccggcctggcaggcggtccccgcttcgaggtagcgctgctgcccgagccttrccggacgccgggctcgctgggggccgtgtcctccgcgctggcccgcgtgtcgggcctcgtgggtccggtgaamcctgcggcctgccggccagccgagctgctcgccgaagaagccgggatcgcgctggtgccctggggctgcccctggacgcaggcggagggcaccacggcccctgccgtgacccccgccgcggatgccctctacgccctgcttcgcgcattcggctgggcgcgcgtggccctggtcaccgccccccaggacctgtgggtggaggcgggacgctcactgtccacggcactcagggcccggggcctgcctgtcgcctccgtgacttccatggagcccttggacctgtctggagcccgggaggccctgaggaaggttcgggacgggcccagggtcacaggtaggctcccttgcagggtgcgaggaggtcggctggtcctgccggcagccggacggcgccgcgagccaagcctctgtccgcagcagtgatcatggtgatgcaytcggtgctgctgggtggcgaggagcagcgctacctcctggaggccgcagaggagctgggcctgaccgatggctccctggtcttcctgcccttcgacacgatccactacgccttgtccccaggcccggaggccttggccgcactcgccaacagctcccagcttcgcagggcccacgatgccgtgctcaccctcacgygccactgtccctctgaaggcagcgtgctggacagccygcgcagggctcaagagcgccgcgagctgccctctgacctcaatctgcagcaggtagacggtcccgggaggagggaagaaggcaagggagaggggagaggacagccaaagcagggagaggaggatgcagccaatggagaaagaaccactggcagctctagctgtttggagtttcctgggtaatgtagaggctctggccccacttggggtctcttagtgtacgaggattgcctctagagagtaggcaattcgacctctcaagtccaacatcaagcagtaaactctaatgaactgtaaactgcaaaaccttttgcaattggcttcaaagtaaacccgtttccaccaccacatactcccagctgtctaaaataaatacttggtgttcttgaaagcaggaaggagggaggatgccaatccaaccttcatccctagttcagaggtatttcctctggggcctcatctggtggtcttagcttttcaagggcctagacaccttgcaagaagcagaaagttccctgggtggattcaggggcaatcctaaccagatccatagtgtatttccaacatccagctaatacctagggatccccaagtccccagaatcccagttcagatcatctaactttactcccgccacaaagggggactagaaaccactatgagaagggaatttagatgtcaacgggcagtgaattaaccaccacaaaggtccaactcacaggcggctgcatgagagaagggtcgtaggggttgcaatttcccatcgatgcccctagattcttccaagaggattggaggtgtccaatggaggggggaggggtgcagtgatgggaatagtcagaagagaatacaagataggaatcataatgagatgggatggagggagggtcggtcagtggagagagggaggttgagaaagtagagagagaaaagcccttcagctctcagtaagtaccacagcagtcctctccactgcccaaactgcgcaagcctctgagcgtgtgagtcacccttgattccttgaattcttcgcccccacttccaggcatcaagccctgttactgttacttcctaaagatcattcgaattcatccgctttctccatctttactgtcactgccctgattcaggccacagcacccccagcccaaatcccaaaacataatctctcagatggtctctgcttcaacactcacctgcccaacacctttctccagatcaagcttcagaaatctgacagatctcaccctgtcatgcccctgttcaaagcctcacagtggcttctgttgccctggatagatgcaggcctctccacatggcttaccaggtcacctgtctttctctctcttccacctcccatgaacttcagccagaccaagctactctgggttcttggaatgtgtccttctcttttgcctctgagcttctgagtgtgctgtttcctctctcttgtccctgcctcccctggataattctgactcatcccctgaaggatggtcacttctaacagctccttctctgtccacagcctagggtggggacacccattcctgtctctgcagctccctcagtttcccctacttttactcattgcactgcctgaacacccctgtctctttggcaagaagaaaggttccttgagacggggtctgtcttgtacactgatacatctttagtgctctgcacagtgcctggctctctgagagatggcaactgggaataatagagaagcctgataagatcgggtggtaacaatagagaaggttttttgtttgttttttgtttagtttttttgtttgtttgtttgtttttttaaggaacaacagaaaatagaagccaaccaaaagataggtgagaaggcttttaggtgaatggtaggtgatgaggttaaaactatatgctgggcaaccaacaggaagaagagaggacctacaggtgatggagaattagaatcaaccaatggtcagagaggaggctgagtcctgaaaagaggaaccagttagtggggagagcaggtgtgacagccaataggagagggaggaagagagagccagtggggagggaggaagagagagccaatggggagggaggaagagagccaatggggagggaggaagagatagccaatggggagggatcctgggaacaactaactggaaggtggcaacagtggataccctgggcttgacaggcagtgaaagaatctggtctgtctgtgggctgtgaccccgacctctgagcccctactctccttctccaggtctccccactctttggcaccatctatgacgcggtcttcttgctggcaaggggcgtggcagaagcgcgggctgccgcaggtggcagatgggtgtccggagcagctgtggcccgccacatccgggatgcgcaggtccctggcttctgcggggacctaggaggagacgaggagcccccattcgtgctgctagacacggacgcggcgggagaccggctttttgccacatacatgctggatcctgcccggggctccttcctctccgccggtacccggatgcacttcccgcgtgggggatcagcacccggacctgacccctcgtgctggttcgatccaaacaacatctgcggtggaggtgagggcgagcaccccagtccccactgagacaatcgccatggaccatccacaaagtgatgaaagagagtggactcctatcctgtaatccgtcttcgatgcccttctaggccctctcccagcctctggcttgcacaggacccctctcttgctgagctccaaagccctcttggaaattttctatcattcccagcctctcccctttgaggaactatgacctacccctagagcctctctgggcccccatccccctttcctggaggggccagcatgtggcatgcctccctagagaagaggcctcccctggcatcgctcctcagtatacctcctgtcactgtcccttcaggactggagccgggcctcgtctttcttggcttcctcctggtggttgggatggggctggctggggccttcctggcccattatgtgaggtgagtagtggaatgaggtaagtaggaagtgagcttgtgccagaaatggaagtctgcagcaaaaacagcaggctgggttcactcaggagtagaggagsagatttttcttggggtgagggtgttctggtgggctggtagagtcccaggggatgtgtgctttggggatggctgccctccaggacccctcccctgagccaacgttatccctcccccgcatcccctgctggtctcttctgacggaacttggtgcccttggtggaggtgacctctttctccaccaggcaccggctacttcacatgcaaatggtctccggccccaacaagatcatcctgaccgtggacgacatcacctttctccacccacatgggggcacctctcgaaaggtgggggaggcagagaggcaggagccagttgtcttctttccgtaaatttggttccttccctgggccagtcccgaccccagctccctacttgggaagcctgatttctaccccagttctgtcccacgtctgaagtctagggatcagcaccctcatctgtgcaatgagggtaacagtacctgtcctgactactttcctggcggggaggtgaagctccaacaagaaaatgaatgtttgctttgtaaactgtaaagcgtgcacttggggagtaatgtcattatcaccttccctcattgagattccttcgcctcccatctttaaatccccaaaactcagcctgacctcaacccaggactctgacaccagaatatattttgacctcttgcattgacctctacctgctaggtggcccaggggagtcgatcaagtctgggtgcccgcagcatgtcagacattygcagcggccccagccaacacttggacagccccaacattggtgtctatgaggtgagcctgaccccagccagacagagagacagtgggggaagaatgctcaggccctgggcagaggggaggcgcactctcaggaggacatgtagtcatgtcaaatcctgcaggctccaggagatgggggatgggagcccagacaggatctagggaaaggtcatggatccctcaaagggaagcacctaggaatcttccctccccaaggatttttctctagccactatctgggtaagggctcctcaaaagctaaccacagtgacccagagactggaggctggagctgccagggagcatgctgggaccagcaggtaacatggtgtggccactgagaccatctccggcctggtcagagcctctgkccctgcccctcagcatttccacccaattcagaccagactcaggaatagcaacccctagagggggaaaagaaagtcacaaaaaagtattaggacattaactttggggctggtaaatctgaatgcggtcaagtggaggggagatgatgagaacagattgagagagagctgagagtgctgagcaaatcaagagagtagaaatttagagctcctgggcttcaggtcatgggaaggaatgcagaggctcctatcatgtcacctagagatcatcatggccaattctcagaggaggcactattgtcatttggggcagattgtcctaaattgtatgggactactctgtgccttgaagaatatttagtgtttcttgtctctggccctgtccactaatgcagctcctagtttttgtgacagttaaaactttccccacatttatttccaaatgctccttaggggtcagtactaaaccccaattcccttctaaattcccttctagtccaaatcccttataaacaagacagggccacctgcataattagcgagatccagggcaagatagaaatgaggggctcctcgttcattcatgatgatggcagraggtcattgaaccaagcttgggcccttcggagcacgaggccctgtgtgactgcacaggtcccatgcctgtgaaccggccctgccaacagttgaggatgaggtccagcatcaggaggggagctgtctatagttcagttagttttcaataaagcctgatctacccagattttttactcccagaacatgttctctcatggcagtggatggtaatgagggttgtgatgtcgatgacacttgtggttgtattaatgcacttaataggactattggtgggcacagctgggttggtgaggacagccatccatggcttcagaatctctgtcatccaggggtgggccctctcccagatggctgtgaagtggatgggcatacatcaaaccccttggttcaatgcattttgtcacatggaagatgcattctgggacagtgagccaatggaaatgagggggaggggttctagggctccccatcgtgggattttaagagactgagttccctacccccatcctctttgctgcagggagacagggtttggctgaagaaattcccaggggatcagcacatagctatccgccyagcaaccaagacggcctyctccaaggtgagacttgggcctgtgatggggcctaggtggccatcggtttctccctccttgccttctctttgcagctgggtacagaggtaggtctcagttaagtgtcccctctggctgagtgtggtggctcatacgtgtaatcctggcactttgagaggcagatgtgagggaggatcacctgaggccaggagttcaagaccagcctgggcaacataaagaaaccctatctctccaaaaattttaaaattagctgggtgtggcgttacatgcctgtagtcccagctactcttcagagggtgaggagggaggattatttgagcctgggagttggaggttaccgtgggctgtgatcatactactgcactccagcctgggtgacagagcaagaccctgtcaaaattaagaaagaaaaaaaaaaacatgtttcctccaccctggagtaggctttcattattctctgccacaccactagttctttcctttgatcttgttgcaatgtgcaattgtatgttcatctgtctgcctgcttgtttctgcctctctcgctggactgtaagctgagtgagggcctcctcactcccctccattgtaatcaagcacccaacacagtgtctggaacattagagagacccagtgaatgtttgttgatctaatgatagaaaataaaaaatgagtttccggttctgtcaggccacttgtgcagaatagccctggacattctgaatgaagtgcaaagttggcaaggaggctgtaaatggcttattctggtccttacaaccttaatgtctccctttatctccatgccatgcagcctgggcctggccttcttccctgattcctctacaggagctcttggtcacagatgcagtgacttaagtggactatgtgtatggggattaatgaactcgatcaccwtttaataccaggtgtttaaaatgaaaagtatctgggcgcggtggctcacacctgtgatcccagcactttgggaggccgaggcgggcggatcacgaggtcaggagatcgagaccatcctggctaacacggtgaaaccccgtctctactaaaaatacaaaaaaaattagccgggtgtggtggcgggcgyctgtagtcccagctactgtgggaggctgaggcagaagaatggcgtgaacccgggaggcggagcttgcagtaagccgagatcgcggcactgcacttcagcctgggcgacagagcaagattccgtctcaaaaaaaaaaaaaaaaaaggaaaggaaagaaaagtatccccttattgggcatgtggagggaaaagctagaaagggcaccagtcagccagctaagccacctttttttctagcatgccccgattgtgagggcactgtcctgcagagcagtcagtcctgtcttccctaactgagggagggtgggagtctcagacccgactgacacaatgacgtaacgccaagcagagcagcccccggccaggttgcaggcacacgccatttctggtgtcctttgaaagtggcacagcttcaggccgggcaccgtggctcacgcctgtaatcccagcactttgggaggctgaggtggatggaccacctgaggtcaggagttcgagaccagactggccaacatagcaaaaccccatctctactaaaaatacaaaaattagccaggcatgatggcacacacctgtaatcccagctattcgggaggctgagacgggagaatcgcttgagctcaggatgcggaggttgcagtgacccgagattgcacgactgcaatccagcctgggtgacagagtaagaatctgtctaaaaaaaaaatacataaacaaaagaaaagaaagaaagtggcaccgctcctccctggctctcccagcaaaggctgttaaatcaggagaggatggtggttccaggagcttctccttcatgagctgcttcccttaagacccaggcagttcagagttttatggctggggccaggtgtggtggctcaggcctataatcccagcactttgggaggctgaggtgggaggatcatttgaagccaggagttcaagaccagcctgggcaacatagcaaggctcccatctctacagaaaaaaaattttaaatgttatctaggcatggtggcacaagcctgtagtcccagctattcaggaggctgaggtaggaggatcacttgaaccaaggaatgaaaggtagcagtgatttatgatcatgccgctgcactccagtctgggcaacagagtgagacctcgtgtctaaaaaaaaaggcttatgatcaataaatccgaacctgcctgggtcctgatcaccaatgcaaagttgtcttttcattcacagcattaggctaaaccatactcagtatccaaacagtggcctttgactatattgttttttccaaaaataggactatgtgtagaagagagcccccgtacataccttatyaaccatttcatccaccatttgtaaaaatctcatcttctgggtctggatactcaaaaacagatcttgattaacagccccttccccacattgccctgggcagaaaatgcaagtcaactctccccctctcagctccaggagctccggcatgagaacgtggccctctacctggggcttttcctggctcggggagcagaaggccctgcggccctctgggagggcaacctggctgtggtctcagagcactgcacgcggggctctcttcaggacctcctcgctcagagagaaataaagctggactggatgttcaagtcctccctcctgctggaccttatcaaggtgtgtgtctgggggtggtggggtgacgtcctgggggcagggatggggagcaagggaaccaagcaggctgaggctgcctcttaccctacccattccaagggaataaggtatctgcaccatcgaggcgtggctcatgggcggctgaagtcacggaactgcatagtggatggcagattcgtactcaagatcactgaccacggccacgggagactgctggaagcacagaaggtgctaccggagcctyccagagcggagggtaagagtcccctgtgcagacgaggatccaccgggatccccattatttcaagggcttctcccccgcttcctccctacctctgccctcgcactctcttcatcccacatccaccagacacaattcctgctacagaaaagatcttgtggcctctgagagggtgggctctgtgacttcggagacggggctgctgggggcgggacttgtacctgagctgcctgcagcagggtttgctctgattacaagtttgcctgagggtggggcttgtgcccaagagacggagccttccctgggcaccaccttttctgaagggcaaggcctatttgccaggctttctctgagatggctcctagagatagttgcagggctggtctcaggttgcagggtctcagaccggtctcaggctgcagggttggtggtgtctgggtgccaacctgggctttctggtgagggtgggagtctttccccagcggcgcctcagccccttccccatccccagaccagctgtggacagccccggagctgcttagggacccagccctggagcgcyggggaacgctggccggcgacgtctttagcttggccatcatcatgcaagaagtagtgtgccgcagtgccccttatgccatgctggagctcactcccgagggtaaggctgccctgtgcgtggagttcggcccacaggggcaccctgcagttagaaaagagccagcctcactctttcctctaaagcaaagcccagtgatgaaactcaattatacggaggcccccttaaagctggcatctgcaggtctgggtgcagaaagccgtgcatggccagggtggggagcgtggttcattaggtcccagaccacaacagcttcctctttcttgatgctggaaccaaactgtttccacaactgacagaacagactcctctctgttctcaggggtccctgggaggagcaggggagggggagtgggtgcatcccttctgcacaggactctgagcaaactacttgatcacctatccctcacttgtcttacatacaatatgttagtttctttgcctatgtcacctcttactgacccccagagttcgaggtcctcttgttcctcctagcaacccccttccacactatactctccctccacacacacacactgaacctctgatgtaaagaaacccctgccaggcaccccctcccacatcttggtcttcaacagtcaggccagggtcagaggcagcctttgtgttctgggggcactccccctcactgtcccctcatgcctccagaagtggtgcagagggtgcggagcccccctccactgtgtcggcccttggtgtccatggaccaggcacctgtcgagtgtatccdcctgatgaagcagtgctgggcagagcagccggaacttcggccctccatggaccacaccttcgacctggtcaggggctgggagtgggcaaggactgggctggcctctgggatcccaratgcttgtcagcaacctgagacagctgcagacaggcaggctggcaggacctctggccttccaggctacctcctaaggagtagcctgaagactcggagtttgggggcagaattggaatgggggctgtggaggcttttggagtgggagatagwgttctgtctgggtgggaggaatattcaattcaattcaaataacactgattgagaaccaagtatgtgcttggcctgctgtgacagaaagacccttggcctgggagcccaacgattgggctggctccagtgccctgtcaattactagctgagawcaactgacctctgggaaccctcatttcccacgtgcctcctaatcgtgtctgaaaacacagtgcccagcaccccggggtgcttgatgaatagtagatgaatggtggcagcggggttggggttcagagtgaacagccccatgagagggcccatgaggggggcataaagagggcatggcaacccaggtcttcagcagctttaccagcttccttctactgctagttcaagaacatcaacaagggccggaagacgaacatcattgactcgatgcttcggatgctggagcagtactctagtaacctggaggatctgatccgggaghrcayrgaggagctggagctggaaaagcagaagacagaccggctgcttacayagatgctgyctcccgtgggtgccagtgggaaggggtgggctgggagggcakctggagcccagccaggtagagtggccyccaggtgacctcactgcctgccatccctaggtctgtggctgaggccttgaagacggggacaccagtggagcccgagtactttgagcaagtgacactgtactttagtgacattgtgggcttcaccaccatctctgccatgagtgagcccattgaggttgtggacctgctcaacgatctctacacactctttgatgccatcattggttcccacgatgtctacaaggtgcagtgtgtaggggacaagccctcctgaccttcaattcagcttcaccagcctccagcccagcccttcctgcgcagcccctagcctacctgcccaatcaatcttstttcccagacctccygtcccttatttattcctccagtccccagctcagtccttccactagcaacctggttctgcactaaccccaggtgggcccggtgacaagaggcaatcgcttcgtgtactcggggggaatgctcaaaagaaaattcacacaactccttcttcccccaggtggagacaataggggacgcctatatggtggcctcggggctgccccagcggaatgggcagcgacacgcggcagagatcgccaacatgtcacyggacatcctcagtgccgtgggcactttccgcatgcgccatatgcctgaggttcccgtgcgcatcckcataggcctgcactcgggtaactcccgggtcttcccaggctccagcccatctccctctttagggcctggccccagatttcctgtagaggaggcaactcatggagcggggagtggggcttaccttgaagaggatgcacttaacaaggcttatttggggggctggtggagataatgggtgcgaagatcmcccgaggccctacctaggtgcagcccagggccggccctgctagccccgccgacccccagcatctccacaggtccatgcgtggcaggcgtggtgggcctcaccatgccgcggtactgcctgtttggggacacggtcaacaccgcctcrcgcmtggagtccaccgggctgcgtgagtgtgacggggacaagacggggaggtgggagggggacacgggaggtgagtcccgagctcacggcgtcccccacckccacagcttaccgcatccmcgtgaacttgagcactgtggggattctccgtgctctggactcgggctaccaggtggagctgcgaggccgcacggagctgaaggtgaggcagggccccaacccctcccggaggccccgscctgtcctgaggcaccgcccatcccgggccgcggctgcaaacctcagctcacccttctgacctggtctcccagttccacgcagactcgagatcccccacccctcaccccagtccgcctaagtccttccctctcccatgtctccccagggcaagggcgccgaggacactttctggctagtgggcagacgcggcttcaacaagcccatccccaaaccgcctgacctgcaaccggggtgaggggccggcctccgcggcagggcgagggacgagggacccctgcctcctgctctgtgtctgaccccccgcgcgcgaggcagcgatgacgtgggccctgccctcccacgccccattccccttccctgaggccaccgccccctccttgcaggtccagcaaccacggcatcagcctgcaggagatcccacccgagcggcgacggaagctggagaaggcgcggccgggccagttctcttgagaagtgaggcccggccccggacaggtactgccccctcagccccaaccccagctgccgcgtcccctctgctgcctgcagaacgycccacccaagccaggtgtcccgatccctttctgacttagagagcccaggctggttcctaaaccccggggcttcccctgggagggaagcagccattgcaggaattttggttcagtagatctggagtggtttggaaatccaggcttaggaaactccgtaatcggggccttctgtggcccctcccctggccctatctcatccccagtgcataaacctggcttccgcagaagcctcacaggctgtgcactgcacaagagacaactctagggggcagcagtcaccagagracaatgtgaaagcagaagccgtgcccactcccctcctgcaagaaactgacccgtgacccgctccttcctaggtgaacccccatgacccctttcctcgactcccctctgagatacccctcttttcttcaggattgttctggaaggtccttttcctgaaagttgctgctataggtgactggaagtctgtctaatgctggtggactctgcccagctctgcctcaaaggattttgggccttttacaagagctggttgcaaaaccagccatgtgaccttgggaaagtgtcacgcatgctctgctgtgatcccttcagtggcaaaatggggggtggcctaagtggttcccaaggcccctgtgcacctgacagctgggtggcttgtggccctcacccccaggagccctgagtccagcaggggatgtgagggtcagggattctccgcttcccagtgtctctcagggacccaggaaggaggatctgggattgatgcccgaccccagaggaagtggagttctgttccaccagagcagggtttgtcacatggcctgagggggcaagggctcctgtttagcctcaagcttcattcctatctccatctcccaccagtcagaaactggctgcttctcctgtgggtataatcagggaacttgcccaagtgcagagaaaagcttgcttcaatgctttgaggaaaggaaattgtgccacaccttgactgaccagaacatccaaagagcggcattctctgtttaactaggagctgctgagcaagcagttggacagaaaatcctctctgcttagaattttttctttttttttgagtctcactttgtcacccaggctggagtgcagtgcagtgacacaatctcgactcattgcaacctcctcctctcaggttcaagtgattctcctacctcagcctgccgagtagctgggattacaggcacccgccaccacgcccgggtaatttttttgtgtgattttagtagagatggggtttcagcatgttgcccagggtggtcttgaactgacatcaagtgatctgcccaccttggcctcccaaagtgctgggattacaggtgtgagacaccgcgcctgacctttgcagcaattatcaatgccctgtcctggcaagtccccagttgaagttgcctttgtgaaactctgaccttccagagcctgggccttggcacatttgactcttggtgtctgtcaccattgctacagaccctggaagaagtttgcagcaggctaggaaaccacctaggctgccaccagaggtagtgagtgtccagtccctggaggtgtgaaggcagaactggagacatcattgaccagggatacgacagtgagagggaattccggaactgaaccttcactacaccaagtgtggttggtgggccagggtcggcactgcctgtgagctcattagaaatgaaggatctcagggccccaccccagacctgctgagtctggatctgcattttaacaagttcctacaaaatattgacacgctcattaaagtttctgaatcatagaactaaatcaccctaagatctttaaatcttagaatctctaagatctcataaagccaggctacaaactagccaccaaatttcttttgtttggcctatagagtgttttgttttgagctaacatttaaaaatcaacagcttccacattttaaaaatgtatagcagatttcccccttctcttgaaatcagaagccccacatggtgcttgtgtcaccacttaaccacattctgctgcagctaaacagcaacagtcccctttatccagatgtcgccactcccyacagactccgagacaccaagattttytgaacattcctttatattcctgcctggtgcctgtagacattgagcttaggactccttagcaggtattaggattacaggggctcctggacgggactttgccttcttttttttttttttaaactgattcatgacttccacaagcttagtggtattcccctccttcctaaaggtgaaggaagaatgtatcaaacatcgagaatccagcacttgtaagttctggttaccgaaggtgatgttgctacagagagcaatttagtgcaattttaaaaacattttaaattgaatttaaatacgatgaattaaagattaaaaacaaaacaaaacccgggcatgcacacacacacatttttaaaagttatttacattcttgaagattttccttaagattttctctgtacttaggtcccagggattgaagcgcagattcacatctctggccttggacctgactgtgtggatagagctctcagcctcctgtctcttccctcccgtacccgaccctgcagcccttccccttccttccctctctccctgcctgcaagggcctggagtagttaatggtgtgtgatttcggctgcctcaaggaagagtccaggattaggtgcagagggattagctgggacaggcttaggcagggctcctcccggaagcagaggcggatgagccagagggcagacccagtttaaggtagaagtggagtgggcagggctgagccrgttccttcccaccttcactcagcctccttcccaggctggcctcaagctcaagtgaccagatgtgatagaagagccctgacccctccccagctagaagaacttggggaacccccaccccagagttcacagatctagtgggagaagagaaggcaaaagatgaagcctcagcctcctctctgtgcctcagcctctcctttctctgttcctgcctccctttctgctctattctcctgtctttgtgtccccacagtcccctttctgcctggcagtctctgtctgcctttctctgcagtttccaccatttctctggaaatcttatttcctggacccagtcggttatccagtctcagggctctgctgactcaagtcctccccaccctgttcctgtggcctgggcaactcccagcgcatgagagcaccggggcctggcttggtcactgggcatcccccaccttcagatgtgtttacactacctctgccagctggcctgcgccaggagcccacacttgcggttgtccttgccttggagatggctctgtagctggcagagcagtgatggccaaagcagggacctctcatagctgctgcttcaatcccacggcagagactctacagcgtgtcccggggctcacctggcgcctttttttttttttttttttttttttgkgcttctccttagggtctgggccctgctccctgtcccatctgcagtggaccccaggcacccccctttgaggaggtggggtgaactgctccttggcagggatttgtgacactgcattgctgggctgtgttccycgggctcttctggaccttgcaccgtggataccaggccatgtgccatggtatttgggtcctgggagggtgggtgaaataaaggcatgctgtcttccatgttgtggtgtgtgctgcttttagccaggagagtagtctcgacacccccatctctggaacgctcagccctgccatttccagggagggtttcagatagggttgaaccttagagatggcctgaagaggggaagtggccggggccaacagctcccaggaactcctctgctcagagaaccagttggggaagtctcgggcctctcgggctgctggaaaagaccagggtctctgacgcttttaaggtgggtgatgtggcttcatcccttgattgtatgcaggagggaagaaggaagagaaggacagagcttgtctatgccatgactccatgacccatggaccataacctacaaacatgggagccagagtccaagactgaaggaacagggcccccagatgggaaaggtgaggtccactggtctctgggcaggacctcatcaacaacccacactccacctctgacccttcacaaacctgcccctggagcttcagagcaggagagactatcccaaaatcaccagtgggtgactggcccctaagtcttccgggagcccagctgttcccgtgccaggcccaatgtcccagacaggatgacctgtaatggacatcgactgtgctgccttcctacatccatcctgctgggcagtgggcagccatctgtgccccattcttaatcccagtggaagtggctagaactgactgctgacttcccccttcaggccagcccaatcattccgttcctctggcctcaaagacagatgagctgggccaggctgatgaagctcggtgctgggacgttgtttgaagccatggggagaaattgtcttcttggggggttgctgagaggatgggacattgagagatccttgccaccacaaagacagagctgaactggcagatggagagagacaaagtcctgatggctactgtctgagctgggatacctcactgggcctaaagccaagtccggctgtttaagcaacatgggccagcaaattattttctttgcttaagccaggttgcgttgggttctttcttttctttctttcttcctttctttcctttctcttttctttctcttctttctttttctctctctctctctctctctctctctctcttctttcatacctcaaaaccctcacgatggctgggcacagtggctcatgcctgtaatcccagcacttggggtggctgaggtgagagaatcactagagcctaggagttctagaccagcctgggcaacatagcaaaatcttgtctctacaaaacacaaaaattagccaagcatggtggtgcacacctgcagtcccagctactccggaggctgaggcaggatgatcacttgagcccggaaggtcaaggttgcagtgagctgagatcacaccactgcattccagagcgagactgtcacaaacaaacaaaaaccttcgtgatgttttcacggtgatgaaatgttggtccatttgattacgatgtgctgatggctgcaagttcaacaggtggctttcccatctactccacctcctcacccaaaccactatgccaagcagacacctatccatagccacgcactttatggcctcgcctcaacatcattccctttgtctctggccagcatgtcatctcctaggcctctctctcagccttgatcacccactcccaagctgcatgcctccatcggcatattcctattgcaactatcaaccaggggccgctgaggccacaggggttctcctgcatggactggctggtcctcaaccacagtccctggggtcacctctcccagggcttagcctttatccaaggataaagggatgggcacccagagctcctgccacactctcttccagggcagaggcgagggcagggtaggtcgcggccccagtggaaacaaggcctgagggactgcatacccagctttgaaggtctgccctggaaggccccagactgcttcaggctctgaaaaggcaatgaggagggtccagtgctgagctcttatcctcaatgatgccaaggggtggaagcctttctggcgcttggagaagaggcccagccatggggtggctgaaatagatgatctcagattatctcaagaccagagctgatcccagaaactggtccttccctgagtaaatgcttcccagagaaggccagaggacatgccctgtgatgatgcagctgtacaagatgctccactgggagccagaagggaagcagagctggaggtcctgtgctcctcttttgaagaagggagaggtttaagatcatcagcatgctgaaggggggaagccagtactgtgagggagacatgggatggggtgacgggggaatgaggctcctgtgtccagtggggatagatccaagcactgcggagtgattgccttggatgggaagaagggaagcctttgaaagaggattagaataggacagcttgggcctgggaggagctgcacattccaggactttccatcaagagtttctgttttttcaagaaagtggaaggtgaggtcatcttctgagtgtgtgggggagggaggagtactattttccttgctaagtgctagaaactgggctaagcactttacctgataaacctcatttgataccttgagaatctcacgaggcatgtgcagttggtcattggtatccacaggacctacatcctcagatattttttaagggggagggggaacggagtctcactctatcacccaggctgcagtgcagtggcatgatctcagctcactgcaacctccgccttccaggctcaagcgattctcctgcctcagcctcctgagtagctgggattacaggcgtgcgccatgatgctcagctatacatcctcagatttaaccaacagcagatagacaatatctaaaaaacaaaacaaaaaataacaatacaacaataaaaataatacaaataaaaacaatacagtataacaactatttgcatagcatttatattgtattaggtaatctagaaaagatttaaggtacacaagagtttgtacttaggttacacacaaatacttctgcaccattttatatcaggaacttgagcatcctcagattttggtatccaagggggtcccggaaccaatcccctaaggatacccaaggataactgtctattacacttctgttttacagatgttaacactgaggcttagaaaggtcgtttggactgcccaaggtcacaaaagctactaaatgagcactgggactctacttttccaaagtcttaaactctacactatttttttaataacacaatgggtttatatttaatatagtacttctcatcaggaggatgttactcagttaatataaagtttttttcaaaacactaaatctcttttccatgtcgatgtcaatagtttttttttttaacattaaatttttttccgcatttcagtattagatacactgaatacatttttctaaatgttttttccccagagataaaagttttcctttttggctgactctccaatatctaaatataatattaacttgggagacaacaaaacaaaaatctaataaaggaatggagaaaagactcctcaacgattcaggaggcagtgattataaccgaacagtggtgatttcctaagattctgggcaagaacttccttcttcctatttcacatgctttgagagaattctaagattatgaaatattacttatgtaaatttcagccatcttacttctttgaccgcctttctaactagcaaattataggctgcatttttctgtgcattatttgttgtaaagaaaacatttttttttctatttataaatgtatgtttgttcccatttcatggaaacaatgaaaaatgtgaaactcccttatttactgattcttggaacctttcacacaccaaagctcaggtttagcctctatagcacaaaggttttcagggtgaggtttgactcagtaggcctttcaaagtcacatctgtccatttctttttcatgcgtatacccccgggcgattgcatcaccgccttctactgcttccacaacaggcagcaccaaaagcagtgacatgaggactaagcacaactgtgttgaaactgaggtcatgatattggaatcttgagggctgaaggttccaaagaaatggtatatatagaattctatctgacttgaaattttcccttcctggagctccggatgctgagattaagaggttccacgtgacatgaccttccaggaagcagccattacaggaatctaaactctacattattaataaagaggcaagaactgatgggaccaagtccctgaggaaatagaagtagctctggacaacagaaggcaaacctcttcctctgagccgggagcaggaataggagagatgaagtccacatgttttgtttgtttgtttgcttgagatggagtctcactctgtcacccaggctggagtgcaggggcacgatctcagctcactgcaacctccacctcccaggttcaagtgattctcctgcctcagcctcccgagtagatgggattacaggtgtgcgccaccatgcccagctaatttttgtatttttagtggagacaggatttcactatgttggccaggctggtcttgaactcctgacctcaggtgatcctcccaccttggcctcccaagatgctgggattacaggcatgagccaacatgcccagccaagtccacaagtttttaatgggaagtaaaggctgccaaagagcttcctttctggcgtcatcagggacaaggatggctgggtgtctggcatgaatcagataaatggacagggagtcaggtgagagtttgaggggtctttggtgagggtaggggacagggagggagctcagcggggagggggtctttgtggagttccagatctcccaggtcttcagcctcctggggcccaggatccctgagtgtggagaccctgaggaaagagccactctctagtgtcaagcattctcagcctcaaggacccagcctgcggcataagagggcactaataacccaaatagcaacgtacacaagagggacatcacagggctgggggcggcgggcgggtgcacagggaatgtggaggtgggccagaggcctggagcccatgacagcatgaggcctgttcagccattgccagaagccagggtgcatttccctgaccagaaaagaccctgccactagccaaagctagctgaggccttggacgcattggatttccctgtttggaaaatgtataagggaattaccagacagcttaggggaggcagctattcacccagggctgggggtcctcacatttgcagaggccccacactgcgtggttcttttctttagcatggctcagcagccccagagcaggggccagggaggggaatagggcttaaccaggggcatctggggcaagacagggtggcaggaggatttaagggcttagggagaaagtgatgaagtgcctcagacactagttttaaacctacctcctgcaagcagccttcctcaaatcacatgggggatattgattttgttttctattacctggaaatggtctccccatcgtttctgagaaatccacactacctcacagctcattggcattgccaacttgcctccagtgggcacagccagcctagcatcttgtataaaccctccccagtggacacgggaaattggaccacgggtgggttcctgtcccaaactgggtcagtgagagccctttgctggggaacgtggagctgatgcaaagacactccaaaaccgtctgtctacctcttagagaatccataaacacaagctgttgtggcactcattctctgccttgggaactggaaacagaaagaactggaaaagcgagagaggacaaaacaaacatgcagagaagagagagatggagagaattttctaagttcttacaacgaacgctctagtctctgcctttggctatccctgaggccctgctggatccctagcattttgtccttacaataaattctcctctttgctca

SEQ ID NO: 96159 - DNA, 37415 bp, Homo sapiens
  misc_feature (1)...(37415): n = A,T,C or G
attttgtatcctgagactttgctgaagttgcttatcagcttaaggagattttgggttgagactatagggttttctagatatacaatcatgtcatctgcaaacagggacaatttgacttcctcttttcctaattgaatgccctttatttccttctgctgcctgattgccctggccagaacttccaacactatgttgaataggagtgatgagagagggcatccctgtcttgtgccagttttcaaagggaatgcttccagtttttgcccattcagtatgatattggctgtgggtttgtcatagatagctcttattattttgaaatacgtcccatcaatacctaatttattgagagtttttagcatgaagagttgttgaattttgtcaaaggccttttctgcatctattgagataatcatgtggtttttgtctttggttctgtttatatgctggattacgtttattgattttcgtatgttgaaccagccttgtatcccagggatgaagctcacttgatcatggtggataagctttttgatgtgccgctggattcggtttgccggtattttattgaggatttttgcgtcaatgttcatcaaggatattggtctaaagttctctttttttgttgtgtctctgccaggctttggtatcaggatgatgctggcctcataaaatgagttagggaggattccctctttttctattgattggaatagtttcagaaggaatggtaccaggtcctccttgtacctctggtagaattcggctgtgaatccatctggtcctggactctttttggttggtaagctattaattattgcctcaatttcagagcctgttattggtctattcagagattcaacttcttcctggtttagtcttgggagagtgtatgtgtcgaggaatttatccatttcttctagattccttttgggttttctatgtagacagtctcatcattaagatgatatcaaaattaaggtgttgtttttgcctgtcctatcttatgtcttttttctttcttgtaaaatctgtctaggacttctaccatctgtttaaaaaaagccataatagtgggcattcttatcttgttaataatattaaaaggaaggagcctaatattttactactaaacatgatgtttgcttgactcccagtagggccgaaaaagaaaatgaagtttgctgttgaattttttagatgccatttgttatggtttggctctgtgtccccacccaaatctcatgtcaagttgtaatccccaagtgtcaggggagggacctggtaggaggtgattggatcatggagaaatcccttgctgttcttgtgatagtgtgttctcacaagatctggttgttgaaaagtgtgtggcacttaaaagtgtgtacctcgcccccatctcctctctctttctctcctgccaccatgtaagtacatgccttgcttcccctttgccttctgctatgattataagttttctgaggcctccccagccatgcagaactgtgagtgaatgaaatctcttttctttataaattacccagtttcaggtagttctttatagccatgtgaaatggactaatataccattaataacactaagagagttttatccctagctttgcttgattttgtttcatcataaatggatcttttttttttttccaatcctttttctgcatctattggtgtgatcttaggtttttgatacatcagcatatttttccaattttaaattgatcttcaatcccaacttggttataatgtgttgtattttacaaacattgttgaatttgattgtaaatattttgactgagactggtgcatctaaattataaataaagttgacctataatttttcttccccaagttgtctttggttttggcatcaagatcatactagccttataaaatgtactggggaggtctatttcatgagttctggagggaaacatgtataataactgaaggttttatatatatatatatatctgtgtatatatatctgtatatatatcttatgtatatatatatctgtatatatatgtacatggccaattatgtatgtatataattgcccttagatcaagtttattagttattttattagttgtcttgtctttcctaaattttcatttgcttgatctataaataagtgagctaaaacttcacaatatggtagtggattcaccagtttcttcaatttctgacttacatactttgaagctatttattacacacaaaggtttgaataactattttcctggggaacacaattttttattattttgtagtgactctttttggtcaatgataatgctttttgtattaaagtctaatttaatacaaaatacaggtataccacgaatataggtataccacctttctttttgttggcatttatacggcgtctcttttccatctttttattttcaactcctcacgatccttaatgtttttggtgcatctcttgtaaatggcacttttttttttcaaccaatctctggcttttttattttttaaacttgtgggtatgtgtcatccaacaatctctggcttttcatcagaaagtttatttactttcattgttactattgatatatatgaatttatttctattttgttactttagtgctttcttttcatcctctttttttttaatgctcattatgatattaggtttttgttcatttaatctgtgttttcctgttagtccattttttcctttggctggattagaagttatacactttcatggttatccttgaaactttaccttgcgtacttaaagacttgaattatgtcaactctattaattgatatcttaactacaaagagagaccttagaattctttaactttgtcatccacctctcgtcttacatacttttgttgtctggtgttatttcatgtaatgtttgctcagattcaactatgtgtttacaatttctttgcccatcacttctatctcagactctccttctgaagtaatttttctttctgaagtacatcttttagaacttcctttaaaaagtgtaggtagatgttaaattcagtttccatgtacctggaaattattttatttctatactttaattcttgaaagataattttgctgagtgcccaattctaggttgatggttattttctgccagcattctgaatgtacaattctactctttctgacttccattgttttattgaggaatcaattattggtctgtcatttgtcattaaaataaccaaggatttaacccaactctgccactttattgttctgtcatcttggcaggtcacttccaattccctaggcctcagtccttcattaaccaaagagagataagagcaccaacctcacagctttgttatgaacattaagagagatcatgtatatgaaagcactacacaagtgcttattattaccacaattagctcatctctacattatattactgtcttgttcttttccccctaccactggaaatagttagaatggggcaaatgggtcatagctaggaattcatagccaaaattagaaataaaaaggcgaggcttcttctgggaatgttaagtttctgtaataagaatctaagatgtgttgcgggaagtcagggaccccgaacggagggaccggctggagccacggcagaggaacataaattgtgaagatttcatggacatttatcagttcccaaataatacttttataatttcttatgcctgtctttactttaatctcttaatcctgttatcttcgtaagctgaggatgtacatcacctcaggaccactgtgataattgtgttaactgtacaagttgattgtaaaacatctgtgtttgaacaatatgaaatcagtgcaccttgaataagaacagaataacagcaatttttagggaacaaaggaagacaaccataaggtctgactgcctgtggggttgggcaaaaacagccatatttttcttcttgcagagagcctataaatggatgtgcaagtaggagagatattgctaaattcttttactagcaaggaatataaatattaataccctgggaaaggaatgcattcctgtggggaggtctataaacagccgctctgggaatgtctgtcttacgcggttgagataaggactgagatacgccctggtctcctgcagtaccctcaggcttactagggtggggaaaaactccgccctggtaaatttgtggtcacaccagttctctgctcttgaaccctgttttctgttatttaagatgtttattaagacaatatgtgcactgctgaacatagacccttatcagtagctctgcttttgccctttgccttgtgatctttgttggactcttataagtagttctgcttttgccctttgtcctgttccctcagaagcatgtgatctttgttagacccttactagtagttctgctttttgccttttgaagcatgtgatctttgtacttttgtacctactccctgttcttacaccccctccccttttgaaacccttaataaaaacttgctggtctgagactcaggcgggcatcatggtcctaccaatatgtgatgtcacccccggtggctcagctgtaaaattcctctctttatactgtctctctttatttctcagctggccaacacttatggaaaatagaaagaacctacgttgaaatattgggggcgggttcccccaataaagatgtcagataggggtacagcttttttatattccatccctaccatcattgccttacttcaacttctgattatttcttgctggataattgtatcattrgcatttctcccttcaggctcttaagcctcttattcacccttctcctactgccaaagccttcattttaaaatgcaagtatcattacttctctgattaatatcttacggcaaattccagatttggttaagtacatagtctgtgtgttccctaaaacattctctgtcgcaaagcagcagagcgttgggattaccagacagtggtgttcacatcagaccacccaggttcacatctcagtcttctagttaaaattgtgtgaccttgtagcaaattgtttaacacaggaagctgtaaaacagtaaaaacagtaagtactttatcatgttatgaatgcatgcagygcacaacacctaagtgctcaataagtgttgcctgttattgttacagtatattattaatatattgtaattgtccccataataaactctaaatacagtatatgttaattattattgaggatgacattgtaattgattacgtctcagtctctccattatacctccaataacttcgggggtagaagctgaattactcttttttgcttccctagaggtttacatattatttggtactcaattatgtaggaactgagccacaggcagaaccaagaagctggctattgcttctgccctcgcctgaggtgaattrttagctgcactgttcctgggagtcaagagcttgcactcactctcaagcaaaatggcataactttggcttttcagaatattaaactagtgattctgccttgcccgcctctcaaataaatggtgtgtcaccctagaaasaaagataacacactccgcatacacaaacacgcacaccgcaaggaaccaaaggccaagagtatcaatgtaccagggcgcacacacttcgagagacaggttcggtgcatcgcaggatcccaatctttcttgcatcttcagctctaaaagtcggcacctcggggtatgccaggatcctcgagaaaacagatataaacacatatttacccacaaaacagagataaagcacaagcctgcgggataactggaggagttatcttacagttgagactttctgcaacctgcagattttgccgtgcccagggcacaagtttttcagggctcctgggcacccccgcgaccgtcatctcacttccccggcagcttcctcgccccgaccgcagtgttcccagcgcggctcctttaagccgagctacgcgcatgcgcactgactgcggaactgggcgaacccgggggttcgtttctgctgactccagtgtcccgagaggcgccgcttcttccgctttctcgtcaggctcctgcrrccccaggcatgaaccaaggtttctgaactactgggcgggagccaacgtctcttctttctcccgctctggcggaggctttgtcgctgcgggctgggccccagggtgtcccccatggcggggccgcgggtggaggtcgatggcagcatcatggaaggggtgagtacagagcgaagcggccggggctgcagcctaactaaggaggggagctctcaccaccggtgtgcttacttctcttctccctgtaccccaacctttgcagggcggccagatcctgagagtctctacggccttgagctgtctcctaggcctccccttgcgggtgcagaagatccgagccggccggagcacgccaggcctgaggtaaatctggctggagggggagttgggccgtgaagctgggggatcggggggtcgggctgccgggctggggcatcgggagtccgagtggtggaacccagaaggtcccagacgcaggtatgggcgatccagggcggggcactctgcctgggcggtggcctgggttgtaaagtcttgaaagcctggaggggtgagtttagaaatggtctcgagttttctctgtttgactaaatagtgtcatttgctgaagagctagcttttaaaatgttttcccacctcaccgggcattccaaatatccgaacagcacgtatgagctggcaagatagatagggcagaaatgcttgtgaggccagaggaaaccctgttttataaccagtgcattctggttctgctgtcagttttagaatcataaaacaggaaagaatcctgagatgtgttatcccagccttcattcatacctccagagagctgttatgaccagaattatctgttgtggagaggggaacaccttgacatttgaccttatttcttctgtctgggtagctgggcatgccactagttgagcttcaggtacatgcacctgctagaagaggacccaggtttgaagccacactgattgctttgtatgtattctgtatttattacattttaataaatcagcggtctcagtcttttgtctacagttttgaaattaccaaaaggcaattactgatatgttaatgttaattgcctttgtcatagtttgcagccctccagttcaccaacaggggaatccaattcattaggctgtaggtgttgtattagtttgctagggctgccataacaaaatgccacacacagagtggagcttaaacaacagaaatttatttcctcacagttctggaggctggaagtccaagatcaaggtcctgacaaggttggtttcctctgagagccatgagaaaaggatctgctccaggcctgtctttttgcctcttcacatggtggttcctctgtgtaccttgcccctagcgtctctgtatgttctagtttttttttttttttataaggacaccagtaagattgtatggtggccttattttaacttaattatctctttaaaggctctatctccaaatatagtcacattctgagatacggagggttacagtctcagcatattaatttagggggaacatagttcagcccatacaggcaccatagattgttcagtcaagtgcaagcgagactggtggcactgaaataactattagttttcttctttagcacacttctaatttgcagcaatatatcagggtatgtatttatagtcagaaataactggtctgcaaggaagtgttaaaatgatacatactagcaggtagtctaggtgcanaaaaacccaaaaggaagctgacactgaagatgtggcacttactgtggttagaccttgctgttttcttgccattgcagttttataaatttgtcataaaatgtggggatgtaggcagtctgaatgcacacgttttgatgcagtattatgacctgaaggcctcaacatttatctggactggaaatgattcgagatttgtgtgatgggcaactggagggggcagaaattggctcaacagaaataacctttacaccagagaagatcaaaggtggaatccacacagcagataccaagacagcagggtatgtatcacttaacattccatttaagtaacctgggtttaagtccaggttttgccactttctgggcaagttgcttaatgtctatgagcttgtttccctacttttatgttttttttttttgagacaaggtatccctcttgcccaggcgggggtgcagtggtgcaatcactgctcactgtaagctgtaactcctgggcccaacaggtcctcccacctcagcctcctgcgtggctgggaccataggcacacagcaccatgccccgctaatttttgtattttttaaagagacaaggtttcgccatgtttttcagctggtctcgaattcctaagctcaagcaatccacccacgttggcctcccaaagttttgggattataagtgtgagccaccacacctgtccaataaatattcattgaattaatgaaattcattattactgatagagacttcccagttcaatacttaagcatcattgtgtaagtgagttaaataaagatctgtcttttgatagctaagaggctatgtcgaattccctttcaaactacttatgaatatgattgctttcacttaactttggagaagggagataatggctcatttagaaaacaaccaggccaggtgcggtggctcacgcctgtagtcccagcactttgggaggccgaggtgggtggatcgcttgagctcacaaatttgagaccagcctgggcaacatggcaaaaccccgtcatatatatatatttatatatttatatatataaataaaaattagctgggcatggtggtacatgccggtagtcccatctacttgagaagctgaggcttgagccttggaggtggaaggtgcagtgaactgagattgtgccgctgcactccagcctgggtgatggaaggagcccctgtctcaaaaaaagaaaagataatgaccaaatgtttcactttatgaaattcatcatgttacataactatttcttgtgatttctcacattatttgactataaggaccaaacaggcaagtaaagcaaggattacttcactaaaacttcccatgtgaaatatttagctatcagtctttttttttttttttttggtctcccaggctggagtgcagtggcatgatcatggctcactgtagccttgacctcttgggctcaggcgattctcctaaagtgctgagactacaggcgtgcaccacaatgcctggttaatttttaaattttttgtaaagatggagtctcactatgttgcccagattggttttgaactcctgggctcgagtgatcatcccacctctgtctcccaaagtgctgggatacaggcatgagccaccacgcccggccaagctgtgagtgtttgttattattaaaattaataattattaaaatattttattatactttaagttctggatacatgtgcagaatgtgcaggtttgtcacatatgtacacatgtgccatagtggtttgctgcacccatcaactggtcatctaggttttaagccctgcatgcattaggtatttgtcctagtgctctccctccccttgccacctgccccccgacaagccctggtgtgtgatgttcccctccctgtgcccatgtgttctcattgttcaactgccacttatgagtgagaacatgcagcgtttgcttttctgttcctatgttagtttactgagaatgatggtttccagcttcatccatgtccctgcaaaggacatgaactcattctcttttatggctgagtaaaatattattctatcatatcatgaactccacaatgacaggaactatatctttatacctggaacagtaccttgttatatagtaactaatcatatccagaccttgtctattttgaaagcattttcataaactgctagtttcaagaattcttttgtaaaacttttgaaggttttatttttaattttttttcttttttacttttttgtaatataaagaaaagtatcagaacttagccaaggtcacacagctaatgtgtttagttgaagattcagacccaggtttggttatcatttaaagctatttttctgtggtgaaatactgtttttctttaaaattcaggattttactattcagacactaaaatgttttttaactagaaactcaatggcatatacctgccttcacagttgtctgtgctttagttggtagtgatgaacaagaatatagcttatttaagagtttgaaaagaaaatgcagaaaagaaaatgaaaataagccccttctgccttctccttaggagtgtgtgcctcttgatgcaggtctcaatgccgtgtgttctctttgctgcttctccatcagaacttcatttgaaaggtggaactaatgctgaaatggcaccacagatcgattatacagtgatggtaagggcttttgttgttgacaaactaagatgatctcatacatgcttctgagtctccattctctaaatatatcctgagtgtttttttgtgactttcttgtttatctcttcatggtgtcttttctttctttctttctttttttttttgagacagtgctgttgccaaggctggagtacagttgcatatcacagctcactgcatactcaacctcctgagctcaagcaatcctcctgtcttggcctcctgagtagatgggactacaggcacacacccagccaatctttttaaattttttgtagagtcgatgcctcactatgttgcctaggctggtcttgaactcctgagctctaaggatcctcccacctcagcctcccaaatgtgtctattgcagtagggggtggggaattatgtttactttaagtttgttgttatatcttggaatagtgtttatagtgaattaaaaaaaaaaactcaagtgtagggcccggtgtggtggctcacacctgtaatcctagcactctgggaggctgaggtaggcagatcacttgagcttagaagttcaagaccagcctgggcaacatggtgaaatcccatctctacaaaaaaataatataaataaaaaacaaaaaacactacacacagaaaaattagccaggcatggtggtgcacacctgtccaagctactcaggaggctgaggtgggaggatcacttgagcctgggaggttgagtttgcagtgagctatgttggcactccatcctgggtgataaagcaagatgctgtctttaaaaaaacaaaaaacacctcgagtgtgatataaattatatcagttgtgatgtgttattttataaatacaaggattatgatttggagggaaactcaaactttttttttctattaagccccttccattctaggatcaaacatttaaaaaatgatttaaaaaatactgacatgctcatataactagtgggagagaaaagtggtataattttttttcttctagatttattaaagtgtaattttttcaattgaatccaccctttttaacatgcagttctgtgatttttgacagtgacatgattcacagttatgaaccatctaccacaatcaagacatagaatagttccgttactctaaaaaattcccttatacgtttttgtaatcagtcctgagcctcagcccctggcaactgctgatctgttttctgtcatagttttgccttttgttcagaatgtcatataagggataatactgtacgtaggctttgagtctgggttttttgctctccataatacatttgagattcatccatgttgcttgtatctgcaatgaaaacttgagttgtgttctcgtatatggatgtaccagtttgcatatccattcatctattgaagggcatttgggtgtttccagattttggcaattataaattaagttactgttaacattcatatacaagtttttgtgtgattgtacattttcatttctcttgggaaaatacttgctgggttgttataataagcaaatgtctaactttataatacatagccaggttattttagcttccaaagtggctacattttgcattattaccagtactatatgagagttccagctgaagtgggcacagtggtgtgtgcctatagtcccagctatttaatacttggtagggtgaggtgggaggatctcttgagcttaagctggagtctagcctgggtaacatagcgagaccccatctctaaaataaaaataaatatcaaatagagggttccagctgttctgtatccatcctagcacttgatattttcaggtttttatttgttaagctttttctgcctttaaaaaaaaacacaaaacaaggttaataacctgtatacctcctggatacataggagacaacccagagaaataagtaaatctctagagtagatctcaaagagttgccttagacatcaggctaaaacaccatctttctctgaaatattgccattctaatagatggtataatcttttcaaagtcagttcgatgggatgtataataaaaattaatctctcctcacctaataatttgacttcaaggaaactcctctaattcaatattgcaaagttcagctaaagataaatgttaaaggtatttgaacagagcattatatactgtaattatcattatataagatatatcattatctaataatgaaaacttggagaaccgttaagtcaattaggctaggatgccatggagtcattcagattttgtttaggaataattttatgatgtcaggaaaatgcttatgtttataatgttaaagcattgtctgtggaatgagatttcaactgtacaaaaaattgagatgacagaatggaatgctcttcaccaataccccctcatttcttaaatgtactatattgagatgcgtgaggaagtattggcctttggagtagaataaccactgatatcaaatatcctaagttccaatttttttcgttagatagacttgcacagctctgattaaataaatgtcaaacttttaaatttagctacatatcagtttttttatttgaaaaaaatggaaccagcctacatattcttataacactgtttacctatagcacccagttactagccagcaaagcgcttttgtttaataaatacacttgttaaattagtgaatattgctgattaacctaatgataaaaactgattttttcaggtcttcaagccaattgttgaaaaatttggtttcatatttaattgtgacattaaaacaaggtaagttgcttgtttcttaaatgttaggatctattacttacgctagaagtagtggaaaagttagacccttagagaactgtctttctggtacccacttaatacattgcatctcttgtaagaagtaattgtactttgtggcttaaaaataatgaatagcaggagcatggggactcgagagcagctacacatcatggttatttatttctagggaaaatattttcaagggaattttcacagtgaggtaccctcatatctagtgatatttcatgccccagcacagcttaagtgctcactgtgtgtagacaactggactagacactaaggggtcataaaaggaattctcttccacaatgtgatcagaattgttttcctaagaaacacattgggcattcaggttatttctctttaaggcttcccttctgccacacaatcactaggccatatttcttggtgtggcatttaagtgctttgaagtcttgccctaacttttctaacttcttcgtccctctcctcctttcaacgtgttatgtattctaacaatatgtttgcttgttattccttaaatatgctttgtgcctttggacttttgtgtctttgttcatgttattcttcccctgctctcccaaaagttagaaatcctatgtttttttcaacgtgaaacttataattctttatgaactgtgattgtgcctcaatcagaattcatatttgcacctatgttgtagcctttcttatagcctgacctgtattctagtagacagtgtgtggagccatctccctaccagatggtgagctctttgaggggaggagtactgtcttctcaccgtctgctgtaaaataaatgacaccaattaattgaattaaaactttttaagtgttttgctacttaaatattcatcatatatttatttgaggacctaccatgtgccagacattgttttaggcacaggaaaatagcaggaacaatataggtaagtctagccctcaaggcgcttatattctacaatagccctgtcaaatagaactttctgcattggggtatatgttccatatctatgctgtccaatatggtagtcactagccaaatgtgactattgagcacttaaaatgtggctagtgcagctggggagctgatttttaaattttatttaattttaatagtttcacatatctcaaggctaccacattgtatagtacagacaaaattttgttttttaatgtataaaattttacaaaatacagacctaaaatatttagacctttccatggattacatgtttggatatcattgacatgtcattttattgtaatatagagctttgtttttgtcatgcaatcagtttatgtgggcatttgttatacttttcataggggatattacccaaaagggggtggtgaagtgattgttcgaatgtcaccagttaaacaattgaaccctataaatttaactgagcgtggctgtgtgactaagatatatggaagagctttcgttgctggtgttttgccatttaaagtaagttgtttagatgttcttagaaataaaatatatgtgtgtcttgataaatattatgtcaactaaattttgaaattattgagagaacttaacatttttttaaggaaagaaataatgtcctttgtggcaatatggctgcagctggaggccattatcctaagcaaattaatgtaggaacagaaaaccaaataccacatgttctcataagtggaagctacgcattgaatacacatggacataaagatgggaacactggggactgctaatgggaggagggtggaagggggctgagggttgaaacactatcaggtactgtgttcactacctaggtgatgggatcattcatataccagatctcagcgacatgtaatttacccatgtaacaaacctgcacatgtacctcctgaacctaaaataaaagatgaaatatatgtattaatggatacattaattaacaaaaataaaattaatttgcataagcatatttaaaaattcagtgctctcttgaaaatcaagttattaaataatgcatgtaaaagctaccaattattttatgtgtctttgaagtcttgaaaacaattttccaaataatcagtaattgttttattctatttttctgtcttgctaaaataggtagcaaaagatatggcagcggcagcagttagatgcatcagaaaggagatccgggatttgtatgttaacatccagcctgttcaagaacctaaagaccaagcatttggcaatggaaatggaataatgtgagacaatactttttcctacacattagttgagaaccctaaaatagttatctaattaaattaaagatttttagggtttcttgcttaagtttatagttttaagaagtatttatttatttatttatttattgaggtggagtctcgctctgttgtccaggctggagtgccgtggtgtgatcttggctcactgcaagctccgcctcctgggttcatgccattcttctgcctgagcctcctgagtagctgggactacaggcgcccaccaccacgcccagctaattttttgtatttttagtagagacagggtttcaccgtgttagccagggtggtcttgatctcctgacctcatgatccacctgccttggcctcccaaagtgctgggattacaggcatgagccactgtgcccagcctcagtttatatttttaaggacattcctacctaaaacaccagtatgataaattaagacaattattctgaattttttctgaggatggcttgccttttgttaccttgtaagatccctttcccttatatagtgaacttaaacgtttaatcagaagttaggctttaaagctagtcctatgagaatatttccagttgcataaaatacgtcaaatgtgaaatcarttcacaaataaatatagcaaagagctttttaaaaccagactagaggccaggcgcggtggcttacacctgtaatcccagcactttgggaggctgaggcgggcagatcacaaggtcaagagatcaagatcatcctggccaacatggtgaaaccctgtctctactaaaaatacaaaaattagctgggcgtggtggtgcacacctgtagtcccagctacttgggaggctgaggcaggagaatcacttgaacctgggaggcggatgttgcagtgagctgagatcacaccactgcactccagcctggcgacaaagcgagactccatctcaaaaaaaaccagactagaactattatgttaattcagttaggagttatagatttaagtattagtacaaattctttaactgatgtttttgaagtataaaagtaccatttttggatatttaagttccaaatcctctcattcagaatttccattaaaaggtttaaagtaaaygcttgctctacttatgataacactatctaaaaaccgtagaacaataccaaagtctctgcataacgacctttttatttaagataattctgaaacactttatagtactgtgtgcctgtgaaatggtaccacttagtgctaatgacatgttaacttgttggggggcatggtagacatttcttaacctgtgaattagaatctggtgtgacttctcctggtcaagtggtaaaggatactactggtctgattaagatagacaatgttaatcataccgctctatatgaagaatttttacttttgcaatttgttgcccagatttagttctgcctatttaatagtcattgttctcttttgttgtatttgcataaatttggaacatttatagcaaaggtagtaataactttttttcttgcatagaattattgctgagacctccactggctgtttgtttgctggatcatcgcttggtaaacgaggtaagataaatgaagggggtccatagttcccaatgctactgcagaattctttaatccatcaggattggaatgttatagaatgatggatgaaagtttaaaaggatgtagttaattgattctcttttagagtcaattacactttcagactttcagtctttctcccacctttatactttggaaaatttcaaacctatggaaaagttgartgactagttcaactagtcatccatacaaccttctcttagattcactagttatgaacatttagtttgttgtgtatatttctgagccatttcaatataagttgcaggtgccatgtctcacccctgaatactgcagcatatatgtccaaagagcaataactacataattataataccatttttacacctgaagaatttgttttattctgacacaccagatagcttcatacataatgaattgtttccaaaatattatttagagcgatgtggaatttttttttttgggggggggcacatagcatttgtttctcaagtctctttagtccctcttttaatacacaatcctcccattaccttttttgttgttgttcatttcatgatactgacatttttaagagtccaggccattttctcacagagtttcccacaatttaaatttgtctgattgtctcatgatatattcagattaaacatttttattaagaatactacataggtgattttgtgtacattccactgtatcacggcagggggcacatgatgttagtttctcctttattggtgaggttgagtgtgatcacttggttaaggaggtgtgtcctgcagatctgtctgccatgaaagttccttttacctttgtaattaactagtgatccaagaaaatattttgaggccatctggttatcctgcacccataacagctttcatccagtggttttaacatctattgatgattcttctctgcatcagttattacattggtgatttcagaattttgaatgtttttgtgaaagggaaatttgtttaaggtttggtatattagagagagaagatacatacatgcatgtgtttgttaatatttaaagttacttttaccaatcaggcaacttttaggtgaacttctagttgtttgcgtggtcattgattgctttattcctactttgtagcatctttaaaaatgcttaccaagctgggcacagtggtacacaactgtaatcctagcactttgggaggctgaggtgggaggatyactgagaccagaagttcaagactatcctgggcaatgtagtgagactttgtctttgcaaaataaataaacaaataaaaatgtttaccctagctatgctgttaagccacactattactactgaatacaaaaaaaattaggaattcttcagtttgctcagttggtaaatctagaactagttgggcatcaaatctgatcaagagaataaataaaatcaccatttccagttgaactcacataaatgaattctgtctaaaactgtgctattcaaaatgtggttggcagacaggcaaacttgtcagcatcaactgggagtttgttagaaatacagattttgggacctacctcagacgtattgaattagaatctgtgggagtggggcccaggaatccattttaacaaactttccaggtacttttaatgtatactgaagtttgagaaatagtgatctaaaatatgtatttggcatatactaattacatattaggtgcagtgaggaatcagtgtggatattgagccactgcatgcactatctacaacagtctttrgaagcaaagagaatacaaatataaaacggagactaggagcagacatattacaagtaataagtacttagcaggcattgggagaagtgtgagtttgtttgtattactggttaccaaatgtgccaggtactgtgtactagggattcaaaartgacagctatgattcctgcctcctgggttattctggcagaggaaacagaccagttctatgatagtggtatccccagggtaccataggaatacaggggaagcaaagggaatccttctggggactgattgacaccaaatctgccttctgccatttaatggtcctccagtgggttctgtgggtaaatagaagttagctggatagaaaagtgagagctaaggaggaaggacaaagaaatttgacatacaaaagtattctgggtgaggtggcatgcagctttagtccaagctactcgggaggctgaagcaggatgattgcttgagccaggagtttgacaacagcctggccaacatggcaagattccatctcttaaaatttttttttttttaagtagccccatatggtggctcacacctatagtcccagctgctcagggggctgaagcgggaggattgcttgatcctaagatgttcaaggctgcaatgagctrtgattgcaccactgcattccagyctgggtgacacagtgagaccctgtcaccaaaaaaatagtgttctgtgtttgagcaagcaactgcaagtggataatagatctgggtaagggaatggagagagatgacaacagaaatatcgacaggccagattctgaaaggctataggttatatctaggaatttacatttcatcctgaaatatagagcatttaatgagggatgtgatatgagagtttttgaaagataattcagagaagtagaagaaagccatattagaggcaggaagataagagttcattacaattcaggtcagaatggtaagggcctgtgccaaggaatgctgggctagagaggtgaatactgataaaagggtatttgcaaaggtgaatggacaatatttgctggccagttgggtatgggaagtgaggaaggcagtgtaaagtatgaccttctagatgtctggcttaggtaactggatatatttacctcttgtgaatatacggggtagagttagtttgccagggtagatgataattttagatatgctgcgttgagattgattgtaaagggatcattactttatcagtaatacatggaatttttttaccaggcctgaaaaaaattttctaatgttctgtcagcatttttttctcactttgtcacatgaaacaacttgtactttaaagtagtttttggataaaacacttgtagagtacacagtacttatttttagacttagggtgttaggagagaatagaggagagagcaacatgcctgctgagattgactgactcctcctggtatccttccttggttcctatcatgcacatcagtcaaatgagatgttagcaaatgcaaaagtaacttgtggtcttctcaatccagcttgtctatatattaaggatctcagagagaatgtcatgacctctattatccagatcccctttcatttctgatttaaattaactagaaaattactggatttaggggctgggtgtggtggcttatgcctgtaatcccagcactttgggaggccaaggtgagcagatcacttgaacccaagtgttcaagaccaatctgggcaacatggcgaaaccctgtctctacaaaaaatacaaaaattacttgagcatggtggcatgtgcttgtagtcccagctactctaaatgctgaggcaggaggcgggaggatcacttgagcccaggaggtgtaggttgcagtgagctgagatcacaccactgcactccagcctaggtgatagagcaagaccctgtctcaaaaaaataaaacaaaactaccagaccttgaatcctaatttcttagggttatcaccagaaggaacattggctgcttgtcaataccaccataggtggtagaggcaggaagttgtaactagagatgtctttatcattgtctcagttactataaccattttgatcttagtttccttatatgttgagcaagaagattagcctggagaatctccaaaatccttctaactataacattcttcaattttattttaaaacggtgagattttgttttgtctgagaaaatctcgctgttttagactgaggcagtgtgttatgatagagagcactaaacagagagtgagaagacctaaattttagtcccatgtcctgtcattatcatgcatagtgactctgggctttccttatctgaaaaatgatattggaccgtgattgtgatctatgtttaaggatcccttccaactttaagtgattgcattatagacagaatgtgttttgtctttccattgttgcgtatctgtgtgatctttcattactcttatcttacagttagttatattctttactatgggagcaaaataatctgctgaaatgaattgtgcctctggttaatcaatctttatttcctttgtgtagtaattgcctcacttatagcaagcaccttccttccctccctcagtgtatgtggtaattcagggcatctctctgtttttgtttttgttttttttttcgagacggaatcttgctttgtcgcccaggctagagtgcaatggagcaatctcggctcactgcaacctccgcctcctgtgttcaagcaatcctcccaccgcagcctcccaagtagctgggattacaagtgtgtgccaccatgccggctaatttttgtatttttggtagagacggggtttcacagtgttggccaggctggtttcgaactcctgacctcaagtaatctgcctcccaaagtgctgggattacaggcgtgagccaccgtgccggcctcatggcatctctctgatgtcctaaaacaagtccttgagacctttgtttaaaaacatccaaaatgtgagaagattggcaattagttagaaaagcattaagatttcagaagaaattgagattttgcttttggtgtgtataatactaataagcaagattctcatattttgcttattatgttcagttgctacagactgctagtaatggcagttagtaatgtagaaccattcatgccattactatcaaggtggctgggtggaaaggaatgtgaatggctctgaggaattctttgctacatggcagaaaactttagtgtacctgctgttttctagtactacaaagccggaagttctttccttttcctttacatcctccatccctattttagctgtttttcaaggactcacttaagtccttcatgctttatgaaacctcaaattattctagaacctatataatctcttacttttctgaactcctgtcgggtatatagtttatatcacagagttagcacttaattatcctctaattttctaatatatgtgtattttaaatgcctccttagcaaaggatctgggttctattacttagcatggtagataaatagtgggtatgcaatactcctacaggttgagcattcctaatccaaaaatctaaaatctgaaatattccaaaatcagaagcttttcaagtggcagtatgccacaaaactttgttttatgcacaaaaatcatttaaaacatnnnnnnnnnnnnnnnnnnnntatgtatgaacattaatgaatttcaggtttgtttatttatttattgagatgggagtcttactctcttgcccagtctagagtggagtggtgcaatcttggcttactgcaacctctgcctcctgagctctagagagcttcccaccacagactcccgagtagctggaattattagtgtgcgccaccatgcctggctattttagtagagacagagtttcaccatgttggccaggctagtcttgaactcctgtactcaagctatctgcctgcctccacctcccaaaatgctgggattacaggcgtgagccactgtgcttagctgaatttcatgtgtagacttgggtcgcatccccaagctatctcattatgtatatccaaatattcctttttttttttttttttttttttaattttgagacagaatctcatgtgtcacccaggctggagtgcagtggcacratctsagctcaccataacctccgcctcccgagttcaagagattgttgtccctcagcctcctgagtagctaaaactacaatcgcacacaaccatgcctggctaatttttgtatttttagtatttcaccatgttggccagtctggtctcgaattcctcatctcaagtgatctgcccgccttggcctcccaaagtgctgggattataggcatgagccaccatgcctggctcaaatattccaaaattttttaaaaatccaaaatctgaaaccttctagtcccaagcatttcagataagggttactcaacctgtgttattattaatagctttttatgtactagtctgggtaatagatgctttataaatattatctctaatttctataacaactttgcagcatarttattatcatctccatcttctagaagaggaaatggcagtggctaacaagaagtcaagattcacaaaacatgtttcaaaccatttcattcagtcacgtaaatacttggccaattgataatataaagagggtaatttattatattattatgactactataaagaaaaatagagtttctgggcatgatggctcatgcctggaattctaacactttgggaggctgaagcgggaggatcacttgagttcaggagtttgagaccagtccaggcaacgtagtgagacctagtcgctaaaaaaaaaaaaaaaaaaaaaaaaaagaaaaaacaagaaaaacaaagaaaaatagagttaaaattctacaatttccactttggggaaaattttatcatatataatcaagtaaatttgcaaatataaaatagaaacaaaactaaccacattttcatttttcataagacgttttcatttgcagccaagaattttttagttgagagtaaataccttaaaataataatgtggcattctactacttgtgacagacttactttgtattcagtgttgtaccaaagatttggaatatgtatggagagatagggaatagggcaagagggtaaatattctgacttatatttaaaataagcgaatacctgttcaaatcttagaggaaataaaactctaaaatattttatctgataatgttatatgctctttttttacataaaatgtaatttcctgactttaaaaaaattctttaattttttttttttttttggcagagtcctgctctgtcacccaggatggagtacagtggcacaatctcagctcactgcaacctccacctcccaggttcaagtgattctcttgcctcagcctcctgagcagctgggattacaggcatgcaccaccatgcccagctaaattttgtatttttagtagagatggggttttgccattttggccaggctggcctcaaactcctgacctcaagtgatccatccgcctcagcctcccaaagcattgggattacaggcgtgagccaccgcactgagccaaattctttaattctgatggaattacctgcagactaattgtaacacgcatgcttttctaggatttgggaggggaatttgtttgtttggtagatggcgtctagctatgttgcccaggccagccttgaattcctggcctcaagcaattcttacaccttagcttctcaaagtcctgggattacaggcatgagccaccatgcctggctgcaagttttaatttttgaaattgaggcatagcattatagggtcataacttaacttataaactggctttataaattagtacattttaaataggactaatgaagcctatattttcctccactagtatatttaaaggtataagacttgtgtatcccaaacactcagaatattaaataactaaagatcttattctaaaaggtgcattgagtgggtttttgaggcctaaaaattgtataccagtgctaattgggatataccaaactttttgtctcttagtaattagttttgttttgttttgttttgttttaatgttgtgcttatcttaaggtgtaaatgcagacaaagttggaattgaagctgccgaaatgctattagcaaatcttagacatggtggtactgtggatgagtatctgcaagaccaggtaatgacacatttaggttaaaaaccctctaacctgttagatttgaatatgtggtagattgaatatcaatttaaataattgactttcagacactaattagcaagtcctacttcaataatttaaaaaaatattctgggatttgcattcctcaaatttcagccctcattttactttacctgtctacagtgttttgcgcaattgaccactccttcctttttgaagtattttctttccttggtttctgaaatactgttatcttcctatctcactggccatacattctagtctcctttgctagtttattatggttttcatcttctcaacaacaatttttttttttttggtggagacagagtcttgctatgttgcccaggctggtctcgaactcctggtttcaagtgatcctcctgcttcagcttcctgagtagctaggcctacaggcacatgctgtcatgcctacctaatttaaaacttttttttgttttaatttttatagagacgaggtctcagtatgttgaccaggctaatcctaaactctggcacccaagtgatcctcccactttggcctcccagagttttgagattaagggccatgagccactgtgcctggccaacttctaaattttgatgagcccctggactttggcttatacttgttttctttttctgtagttgctccctctcttagtttgtccagtctcatggcttaagtaccgtctttatgctgacannnnnnnnnnnnnnnnnnnnnnnnnnnnnnnnnnnnnnnnnnnnnnnnnnnnnnnnnnnnnnnnnnnnnnnnnnnnnnnnnnnnnnnnnnnnnnnnnnnnnnnnnnnnnnnnnnnnnnnnnnnnnnnnnnnnnnnnnnnnnnnnnnnnnnnnnnnnnnnngtggcagagcaagactccgtctcaaaaaaaaaaaaaaaaaaaaagcgaaaaacaaaaaaaacttagcacgttcactcacagtgagaagtgatactgaatatttccaaatattgtttttatggtctgttatctttatagattttcctttctaccatacttttgtctccttagtcccaaatcagtagtgtccacatttagaaatatagtcctcgagatttcttgacctgtttcttaagacagtttctgttatttctagtctcctcctccttgcccaggtctactttaaactcccagtaaagtcccagtattagtctgtctattcagctgttaaaatgtaatttaagagagtagaataaacatcatattatatataccaacttgtagagatagttggtctaagtatattactgttctgtattttacttgtaaatattaatttaaaaaattatatgttgagagctgctaccaagcctttttgtactactcacagacttagggtaacataggttttctgtcatcttctgagtatgtctggaaacctaaagaaayagaaattctgttttagcaatttttatttctagtagtatttttattatgggcagcagtggaattataatgccaaatattaataaatgtgtgaggtttttctttgttcttttttaaatagctgattgttttcatggcattagccaatggagtttccagaataaaaacaggaccagttacactccatacgcaaaccgcgatacattttgctgaacaaatagcaaaggtgagtattctatcagaaagggaaattgatattttgatttttattttagccaattttgggttaaattttaataggaaacttaatagtaatcataattgctatcactgtttcctgtgtgacaggcactgagctaatttagcaatttatctaaactgtctactcagcataactattgtaggtgnctatttattattattcccattataaatatgagtaaagtgaggcagagagaktcattaaattgttcaaggccacatggatttttagtggcagagctgagctttgagcaaacctgggaaagcatacttcaaaacccatgttataatcactgtgtggtactgccttacagagtaagtaaagatgttttgttgtgaactatgatatcaaatcacaagggattcatagttggctataaaaaaatttatataaaattttagacattttattttcttgattctattggtaaaatagaatatttgttgaaactaatattcactgtcctctgaaatttagtagagttgacgtacagtttttaatgaagaaggatttatcattatatgagctcatattcatacctttcctacaggattctttttttttttttttgagacagggtctcgcactgttgcccaggctggagtgcaatggcatgatctcggctcactgcaacttctgcctcccaggctcaagtgattctcctgccttagcctcccaagtagctaggattacaggcacatgccaccacacctggctaatttttctaatttttgtagagatggggttttgccatgttgcttaggctggtctcaaacttcatagctcaggtgatctgtccaccttggcctcccaaagtgttgtgattataggtgtgagccactgtgcctggcctggattgttaatttaaagaaacaataggtatatttcatcatgaaactaatgtaatttctttataggaaatagaggggaaaagccttctcataatttccccttgccggtaaaaccactgttgacatttaggtgttttcctcttctcctaaatcgtttctctttgcattttttgcagttaatgcatacaacttmatttcttgcttatttcagtaacatgtagcatatttcccattttgcttattctttataaagtaattttataaagaaatataaaatttgtaacaattttataagggaagttgctaatcttaagcatttttattattattgtttttgagacagggtctcacactgttgcccaggctggattgcagtggcacaaacctcctgggctctcaaatgatcctcccaccgcagcctcccaagtagctggggctacgggagtgtgccaccacacctggctaattttttgatgttttgtagagatggagtcttgccacattcccaggctggtcttgaactcctgggctcaagcagtcctctgacctcaatctcccaaagcgctaggattacaggtgtaagccagcatgcccagccctagtcttaagcattttttaaagtgacaaaagtaacatatattaatttaaaaaattaatcattacagaagtgtcccatacacaaaaccactgttgctgccctactcctatttgtatgatgatcctttttcttttctttttttttttcttaagatagagtcttgctctgttagcccaggttggagtgcagtggcacagtcttggctcacagcaacctctgcctcccaggttcaagcgattctcatgcctcagcctccagagtagctgggattacaggcgtgtgccaccatgtccagctaatttttgtactttttagcagagacagggtttcactgtggtagctaggctggtctcaaactcctggccttacgcgatctgcctgccttggcctcccaaagtgcagggattacaggcgtgagccaccgcgcctggcctttcttttttttttttcttttaagagacaggggcttgctctgttgcccaggctagattacaatggcagtatcatagctcacagtagccccgaactcctgggctcaagtgatcctttcacctcagcctatcaagtagctaggactgcagctgtgcaccaccacaccctgctaattttttttttttgtttgtttttgttttttgagagacgggatctccctgtgttgcccaggctggtcctgaactcctgggctcaagtgatcctcccacctcagcttcccaaatgccgtgattacagctgtgagctactgtgcccagtttgattcttaattatgtatacttttaattgttattaagaaacatagataagtttttgttaaattgtaggaaagactgatgggaattaaaggcaaattgtatttgatgtcaagagtgttaactctattttttttgttactctacttatgctgtatttataactattacttgtctgtctctccttatagattgatctccttaatagcagagatcaggttttattcattatattctttacttttcacagtactttacatatagtagatgcttacttgttatttgaaatgtatacataacggaaagtgctatgaacctgtgtatagcttgtatcttggtcagctttgttgtgtataactgggtgacttggggcaagtttcttatctttctttgtctcaatgcaaatagttatctgtaaaatcagacttaagctagataggcctgctatgctcctttcaggtctacatatttgtagttttaagtaggtttatgtataggctagaaatgattttcatagctgctacgtgtgtttcatatttacataatgcttgtaatttgaaaaatatataaacgcatgcatatattactaattaattaatatggttacctagctcagaattcagcatttattcattcaacagtaatttcaagtgtccactctgtgtcagtacattaccatgtaatgctgaaagtgaaagaatttttaaacattactattcattcagtaaggcccccaagtgatggttttcaaattgtgcttccaagaatcctaagattttaggcatatttgaaatccttttgccacaaacttaacctatttaattgttttgatttttttttttaagacgttgatgggagttgtgaggagtcttcctgtgttgcccaggccagcctcctgaactgaactcaaatgatccttccacctcagaatagctgggattataggtgtgcaccactgcacctggctagttgttttgattctaaatttagttttgttaaaatgaatcacatttgctttaaaaataatgatgttttcaaaatacagtgatataggccaggcacaatgactcatgcctgtaatcccagcgctttaggaagctgacgcaggaggatcacttcagcctaggagtttgagcctgggcaacaaagtgagaccctgcctatacaacagaattaaaattagccaggcatggtggcatgtgnnnnnnnnnnnnnnnnnnnnnnnnnnnnnnnnnnnnnnnnnnnnnnnnnnnnnnnnnnnnnnnnnnnnnnnnnnnnnnnnnnnnnnnnnnnnnnnnnnnnnnnnnnnnnnnnnnnnnnnnnnnnnnnnnnnnnnnnnnnnnnnnnnnnnnnnnnnnnnnnnnnnnnnnnnnnnnnnnnnnnnnnnnnnnnnnnnnnnnnnnnnnnnnnnnnnnnnnnnnnnnnnnnnnnnnnnnnnnnnnnnnnnnnnnnnnnnnnnnnnnnnnnnnnnnnnnnnnnnnnnnnnnnnnnnnnnnnnnnnnnnnnnnnnnnnnnnnnnnnnnnnnnnnnnnnnnnccctcctccccacataccttctctgaactggatcttttgaacgatatatatagggaactaaattagcaagaaaaaatgtaaagaaattaaagggtaatttgtgacttgacaagataaaagtagaaatgtttcagaaaaattttagggcatagggaatacagttgcattaaaattaccatttgaggtttcaaaattgttatttgcctaagctgtacatctgagctttctgattcagtgtgcgtggaaggggcccaggcatatatatttggacaaaactcacaggtatgtatacctctgaagaagaaccatggttgtacaatgaaatgtgttatcttgaggctattaagtttctttctcatcaatcatttgatctttgtgtctctgtaggtttttcaataaaatgggcttgacattaactctctgcctacataagttggagttgtgggctctttcctccatctctcttcgtattacttatatactcctcttctgatttcaggctaaatttattgtgaagaaatcagaagatgaagaagacgccgctaaagatacttatattattgaatgccaaggaattgggatgacaaatccaaatctatagagtatttgcctcttaaatgatacctcattgatatattgcactatttcataaatactataaaataatgactaggaagtaacttattaaaggctatgacttaaatttgaagatgaagtacagtgttctaggtttgctgagaaggcttcattaaattaatctcactttgaatatctcctgagagatggacaatgaaatatcagttggtggatatgtgtgatagctgatttcaatattgaagtattgaaataaaatattctttacacctgaagtaaatacatttttcttttttatgtaattaattaaatcagggatatagatttgatctgtaatttgggtataattctaatctttgctgaaatcacatctcaagtataatgaggcaactttatgcaaatgtacttgttgtgacaacaataacattttccttttttttttttttttttgagacagtctcgttctgtcacccaggctggggtgctgtggtgtgatcttggctcactgcaacctctgcctcccgggttcaagcaattctactgcctcagcttcctgagtagttggtattacaccaccatgcccagctaatttttgtatttttagtagagacagggtttcaccatattggtcaggctggtttcgaactcctgacctcgtgatctgcccgcctcggcctcccaaagtggtgggattacaggcgtgagccagcgcacccggcaacaataacatttaataggcattgtctcattctaatgatatataccttctacctagtgggcactttgtacatatttattttttattttatttattcattttttttgagacagagtctcactctgtcaccaagttggagtgcagtggcacaatctcagctcactgcaacctccgccttccaggttgaagtgattctccagcctcagcctcccgagtagctgggactccaggcacgtacccaccatacccagataatttttgcatttttagtagagacggggtttcaccatgttggctaggatggtctccatctcctgacctcgtgatccgcccaccttggcctcccaaagtgctgggattacaggcatgagccaccacagctggccgtaaatattttttgaatttgaatctgttttggaagccaaatatgttttggaagccaaacaattaagagaagtaaaattttaaccctagtaggtttcgcagattcatccccagatatgtttttgtttggcttgtgttattaacaaataaatgagtgtctttcaaatggaatgtgctttcattattctctgttatcttacacccaacatgcttccacatttagatgttttcctgttcccggtagcagttgaggttgtgactcaaaggaaatcagtttggtatgtcagcttaatgtgttgtactacaatagagtgtgtaattcattaaaacttgggtctatcttggacctttctcatgatgattaaaacatagtccaaaatnnnnnnnnnnnnnnnnnnnnnnnnnnnnnnnnnnnnnnnnnnnnnnnnnnnnnnnnnnnnnnnnnnnnnnnnnnnnnnnnnnnnnnnnnnnnnnnnnnnnnnnnnnnnnnnnnnnnnnnnnnnnnnnnnnnnnnnnnnnnnnnnnnnnnnnnnnnnnnnnnnnnnnnnnnnnnnnnnnnnnnnnnnnnnnnnnnnnnnnnnnnnnnnnnnnnnnnnnnnnnnnnnnnnnnnnnnnnnnnnnnnnnnnnnnnnnnnnnnnnnnnnnnnnnnnnnnnnnnnnnnnnnnnnnnnnnnnnnnnnnnnnnnnnnnnnnnnnnnnnnnnnnnnnnnnnnnnnnnnnnnnnnnnnnnnnnnnnnnnnnnnnnnnnnnnnnnnnnnnnnnnnnnnnnnnnnnnnnnnnnnnnnnnnnnnnnnnnnnnnnnnnnnnnnnnnnnnnnnnnnnnnnnnnnnnnnnnnnnnnnnnnnnnnnnnnnnnnnnnnnnnnnnnnnnnnnnnnnnnnnnnnnnnnnnnnnnnnnnnnnnnnnnnnnnnnnnnnnnnnnnnnnnnnnnnnnnnnnnnnnnnnnnnnnnnnnnnnnnnnnnnnnnnnnnnnnnnnnnnnnnnnnnnnnnnnnnnnnnnnnnnnnnnnnnnnnnnnnnnnnnnnnnnnnnnnnnnnnnnnnnnnnnnnnnnnnnnnnnnnnnnnnnnnnnnnnnnnnnnnnnnnnnnnnnnnnnnnnnnnnnnnnnnnnnnnnnnnnnnnnnnnnnnnnnnnnnnnnnnnnnnnnnnnnnnnnnnnnnnnnnnnnnnnnnnnnnnnnnnnnnnnnnnnnnnnnnnnnnnnnnnnnnnnnnnnnnnnnnnnnnnnnnnnnnnnnnnnnnnnnnnnnnnnnnnnnnnnnnnnnnnnnnnnnnnnnnnnnnnnnnnnnnnnnnnnnnnnnnnnnnnnnnnnnnnnnnnnnnnnnnnnnnnnnnnnnnnnnnnnnnnnnnnnnnnnnnnnnnnnnnnnnnnnnnnnnnnnnnnnnnnnnnnnnnnnnnnnnnnnnnnnnnnnnnnnnnnnnnnnnnnnnnnnnnnnnnnnnnnnnnnnnnnnnnnnnnnnnnnnnnnnnnnnnnnnnnnnnnnnnnnnnnnnnnnnnnnnnnnnnnnnnnnnnnnnnnnnnnnnnnnnnnnnnnnnnnnnnnnnnnnnnnnnnnnnnnnnnnnnnnnnnnnnnnnnnnnnnnnnnnnnnnnnnnnnnnnnnnnnnnnnnnnnnnnnnnnnnnnnnnnnnnnnnnnnnnnnnnnnnnnnnnnnnnnnnnnnnnnnnnnnnnnnnnnnnnnnnnnnnnnnnnnnnnnnnnnnnnnnnnnnnnnnnnnnnnnnnnnnnnnnnnnnnnnnnnnnnnnnnnnnnnnnnnnnnnnnnnnnnnnnnnnnnnnnnnnnnnnnnnnnnnnnnnnnnnnnnnnnnnnnnnnnnnnnnnnnnnnnnnnnnnnnnnnnnnnnnnnnnnnnnnnnnnnnnnnnnnnnnnnnnnnnnnnnnnnnnnnnnnnnnnnnnnnnnnnnnnnnnnnnnnnnnnnnnnnnnnnnnnnnnnnnnnnnnnnnnnnnnnnnnnnnnnnnnnnnnnnnnnnnnnnnnnnnnnnnnnnnnnnnnnnnnnnnnnnnnnnnnnnnnnnnnnnnnnnnnnnnnnnnnnnnnnnnnnnnnnnnnnnnnnnnnnnnnnnnnnnnnnnnnnnnnnnnnnnnnnnnnnnnnnnnnnnnnnnnnnnnnnnnnnnnnnnnnnnnnnnnnnnnnnnnnnnnnnnnnnnnnnnnnnnnnnnnnnnnnnnnnnnnnnnnnnnnnnnnnnnnnnnnnnnnnnnnnnnnnnnnnnnnnnnnnnnnnnnnnnnnnnnnnnnnnnnnnnnnnnnnnnnnnnnnnnnnnnnnnnnnnnnnnnnnnnnnnnnnnnnnnnnnnnnnnnnnnnnnnnnnnnnnnnnnnnnnnnnnnnnnnnnnnnnnnnnnnnnnnnnnnnnnnnnnnnnnnnnnnnnnnnnnnnnnnnnnnnnnnnnnnnnnnnnnnnnnnnnnnnnnnnnnnnnnnnnnnnnnnnnnnnnnnnnnnnnnnnnnnnnnnnnnnnnnnnnnnnnnnnnnnnnnnnnnnnnnnnnnnnnnnnnnnnnnnnnnnnnnnnnnnnnnnnnnnnnnnnnnnnnnnnnnnnnnnnnnnnnnnnnnnnnnnnnnnnnnnnnnnnnnnnnnnnnnnnnnnnnnnnnnnnnnnnnnnnnnnnnnnnnnnnnnnnnnnnnnnnnnnnnnnnnnnnnnnnnnnnnnnnnnnnnnnnnnnnnnnnnnnnnnnnnnnnnnnnnnnnnnnnnnnnnnnnnnnnnnnnnnnnnnnnnnnnnnnnnnnnnnnnnnnnnnnnnnnnnnnnnnnnnnnnnnnnnnnnnnnnnnnnnnnnnnnnnnnnnnnnnnnnnnnnnnnnnnnnnnnnnnnnnnnnnnnnnnnnnnnnnnnnnnnnnnnnnnnnnnnnnnnnnnnnnnnnnnnnnnnnnnnnnnnnnnnnnnnnnnnnnnnnnnnnnnnnnnnnnnnnnnnnnnnnnnnnnnnnnnnnnnnnnnnnnnnnnnnnnnnnnnnnnnnnnnnnnnnnnnnnnnnnnnnnnnnnnnnnnnnnnnnnnnnnnnnnnnnnnnnnnnnnnnnnnnnnnnnnnnnnnnnnnnnnnnnnnnnnnnnnnnnnnnnnnnnnnnnnnnnnnnnnnnnnnnnnnnnnnnnnnnnnnnnnnnnnnnnnnnnnnnnnnnnnnnnnnnnnnnnnnnnnnnnnnnnnnnnnnnnnnnnnnnnnnnnnnnnnnnnnnnnnnnnnnnnnnnnnnnnnnnnnnnnnnnnnnnnnnnnnnnnnnnnnnnnnnnnnnnnnnnnnnnnnnnnnnnnnnnnnnnnnnnnnnnnnnnnnnnnnnnnnnnnnnnnnnnnnnnnnnnnnnnnnnnnnnnnnnnnnnnnnnnnnnnnnnnnnnnnnnnnnnnnnnnnnnnnnnnnnnnnnnnnnnnnnnnnnnnnnnnnnnnnnnnnnnnnnnnnnnnnnnnnnnnnnnnnnnnnnnnnnnnnnnnnnnnnnnnnnnnnnnnnnnnnnnnnnnnnnnnnnnnnnnnnnnnnnnnnnnnnnnnnnnnnnnnnnnnnnnnnnnnnnnnnnnnnnnnnnnnnnnnnnnnnnnnnnnnnnnnnnnnnnnnnnnnnnnnnnnnnnnnnnnnnnnnnnnnnnnnnnnnnnnnnnnnnnnnnnnnnnnnnnnnnnnnnnnnnnnnnnnnnnnnnnnnnnnnnnnnnnnnnnnnnnnnnnnnnnnnnnnnnnnnnnnnnnnnnnnnnnnnnnnnnnnnnnnnnnnnnnnnnnnnnnnnnnnnnnnnnnnnnnnnnnnnnnnnnnnnnnnnnnnnnnnnnnnnnnnnnnnnnnnnnnnnnnnnnnnnnnnnnnnnnnnnnnnnnnnnnnnnnnnnnnnnnnnnnnnnnnnnnnnnnnnnnnnnnnnnnnnnnnnnnnnnnnnnnnnnnnnnnnnnnnnnnnnnnnnnnnnnnnnnnnnnnnnnnnnnnnnnnnnnnnnnnnnnnnnnnnnnnnnnnnnnnnnnnnnnnnnnnnnnnnnnnnnnnnnnnnnnnnnnnnnnnnnnnnnnnnnnnnnnnnnnnnnnnnnnnnnnnnnnnnnnnnnnnnnnnnnnnnnnnnnnnnnnnnnnnnnnnnnnnnnnnnnnnnnnnnnnnnnnnnnnnnnnnnnnnnnnnnnnnnnnnnnnnnnnnnnnnnnnnnnnnnnnnnnnnnnnnnnnnnnnnnnnnnnnnnnnnnnnnnnnnnnnnnnnnnnnnnnnnnnnnnnnnnnnnnnnnnnnnnnnnnnnnnnnnnnnnnnnnnnnnnnnnnnnnnnnnnnnnnnnnnnnnnnnnnnnnnnnnnnnnnnnnnnnnnnnnnnnnnnnnnnnnnnnnnnnnnnnnnnnnnnnnnnnnnnnnnnnnnnnnnnnnnnnnnnnnnnnnnnnnnnnnnnnnnnnnnnnnnnnnnnnnnnnnnnnnnnnnnnnnnnnnnnnnnnnnnnnnnnnnnnnnnnnnnnnnnnnnnnnnnnnnnnnnnnnnnnnnnnnnnnnnnnnnnnnnnnnnnnnnnnnnnnnnnnnnnnnnnnnnnnnnnnnnnnnnnnnnnnnnnnnnnnnnnnnnnnnnnnnnnnnnnnnnnnnnnnnnnnnnnnnnnnnnnnnnnnnnnnnnnnnnnnnnnnnnnnnnnnnnnnnnnnnnnnnnnnnnnnnnnnnnnnnnnnnnnnnnnnnnnnnnnnnnnnnnnnnnnnnnnnnnnnnnnnnnnnnnnnnnnnnnnnnnnnnnnnnnnnnnnnnnnnnnnnnnnnnnnnnnnnnnnnnnnnnnnnnnnnnnnnnnnnnnnnnnnnnnnnnnnnnnnnnnnnnnnnnnnnnnnnnnnnnnnnnnnnnnnnnnnnnnnnnnnnnnnnnnnnnnnnnnnnnnnnnnnnnnnnnnnnnnnnnnnnnnnnnnnnnnnnnnnnnnnnnnnnnnnnnnnnnnnnnnnnnnnnnnnnnnnnnnnnnnnnnnnnnnnnnnnnnnnnnnnnnnnnnnnnnnnnnnnnnnnnnnnnnnnnnnnnnnnnnnnnnnnnnnnnnnnnnnnnnnnnnnnnnnnnnnnnnnnnnnnnnnnnnnnnnnnnnnnnnnnnnnnnnnnnnnnnnnnnnnnnnnnnnnnnnnnnnnnnnnnnnnnnnnnnnnnnnnnnnnnnnnnnnnnnnnnnnnnnnnnnnnnnnnnnnnnnnnnnnnnnnnnnnnnnnnnnnnnnnnnnnnnnnnnnnnnnnnnnnnnnnnnnnnnnnnnnnnnnnnnnnnnnnnnnnnnnnnnnnnnnnnnnnnnnnnnnnn

SEQ ID NO: 96160 - DNA, 114833 bp, Homo sapiens
  misc_feature (1)...(114833): n = A,T,C or G
ggaggtggaggttgcagtgagccaagctcacgccactgcactccagcctgggtgacagagtgagactccatctcaaaaaataataattaaaaaaataggcagggcacagtggctcacccctgtaataccggcactttgggaggccgaagcaggcggatcacctgaggtcaggagttcaagaccagcctggctaacatggtgaaaccccgtttctactaaaaatacaaaaacttagctgggcatggtggtgcacgcctgtaatcccagctacttgggaggctgaggcaggagaattgcttgaacccgggaggtggaggttgcagtaagccaagatcactccattgcactccagcttggacaacaagagcgaaactctgtctctaaataaataaataaataaataaataaataaataaaaagattctataccatgggctatgaaatcctccttacttctcattttttaattaaacatttattgatttaccagttcatctcctgtccctctctaaagggacactgtagaatataagttccaaggccatatctgttttggtcatcactgttttttttgatttcggcatagtaactggtacacaggagacaataaatatttgtagaatgaatgtataaaatgccaagctcaaaatattattttcattctattcaggattaggaacataaatgaggcaatcacctcaaagaatggtaaacctgattagaaaatggaatcgttagccattaccaaataaaataaattaaagattttttttaatctcaaaaaactcaaggccgggcgcagtggcccatgcctgtaatcccagcagtttgggaggctgaagcgagcggatcacttgaggtcaggagtttgagaccagcctggccaatgtgatgaaacctgtctctaccaaaaaatacaaaagttagctgggtgtggtggcacgcacaagtagtcccagctactcaggaggttggggtgggagaattgcttaaaccagggaagtggccgggagcagtggctcacgcctgtaatcccagcactttaggaggccaaggcggatggatcacgaggtcaggagttcaagaccagcctggccaagatgatgaaaccccatctctattaaaaatacaaaaaaattagctgggtgtgatggtgggcacttgcaatcccagctactcgggaggctgaagcagagaattgcttgcacttgggaggcggaggatgcagtgagctgagatcgtgccactgcactccagcctgggcgacagagcaagactacatctcaaaaaaacaaaaacaaaaacaaaaaaaacagggaagcagaggttgcagtgagctgaaatcatgccactgcactctagcctggtcgacagagtgggatgctctgtattagtcaattttcacactgctgataaagacatacccaagactgggtaatttataaagaaaaacagacttaatggacctatagttcctcgtggctggggaggtctcacaatcatggtggaagagtaaaggcacgtcttacatgatggcagatgagacagaattagagccaagcaaaagaggaaacaccttataaaatcatcagatctcatgagacttattcactaccaccagaacagtatgggggaaaccacccccatgattcatttatctgccactgggtccttcctacaattcataagaattatggaagccacaattcaagatgagatttgagtggcgacatagccaaaccatataaccctgtctcgaaaaagaaaagaaaagaacataacagaacagaactcagtctccagctcccagcaagcaggaagcctcatttttgcatctcagtaaggatcctctgacatgcaaacttcatctttttctccatgttcctactatacatagagtggtcatacattgtccaaactagaacctttttgagagataaaaggaagacactgaacatgtgaatgaaaaatggccagaccaaatgcaaaaatagaactctgactcacaatctgcagcaaccagaccagaaaaccaatatatcatctacaagtcagacatgtaggaagttagatcactatcactagcaaacaatccaggaacccagcaacaaccccgtaacaaacggccccagatggcaaaaactttattaataaatgatagcttttctaatttttggacctgctgtcaacataggaccaaaaagaaaaccaactgtgcatcccaaccaaacacataggatgctctgctagttctatttagcccacctatagcttccctatgacaacagtcttcagttagggcgtacctgaagccttcccctattccccaccataaagttttcccactcctctgcctgtctttgaggctctgccaaaacacaagtgatggtggctgactcccttgttatagcaaactctgaacaaatagtcttcacctcttcttatgtatttggtcttcatgtatttccacaaaggggatactagcaataattttgctgaatcaaaaatcaggactgtcctgagcaaatctggacataaatcaccctagttatgaagcacaattagaccagaagctgtttgcttgtgaaatactgtatgaggtttaggagaatgaaagtgtgaaagacaaaagataaaatacgccactaccactaggtggggttacaccaccaaagaatggaggatgcttcaattaaaaaaggaagtgcttaaagtgtatatgcacttaggttactgttcagtaatctttttggttttgatgcatgatactgtaaatccaaacattggaatcaatgtaaaatggtcttcagggcaataattgatgaaataattccaacgagaaatgttcaagcatattatcatctagtattaattcactttcaattattgccttctgcacctgaagcagtagtgagatgaacaacacattccctgcctttaagaaggaggtggctgggtgcagtggctcatgcctgtaatcccagcactttgagaggccgagacaggcgaatcacgaggtcaggagttcaagaccagcctggccaatatggtgaaaccctgtctctactaaaaatacaaaaattagctgggcatggtggcatgcacctggagtcccagctacttgggaggctgaggcagaagaatcgcttgaacccgggaagcggaggttacagtgagccaagatcgtaccactgcactctagcctggcaatatagtgagactccacctaaaaaaaaaaagaagaaaaagaagaagaaggcagcattctagagtacttcaagtttacatatgaatggctggttacataatttgtaagacccagtgcaaaatgaaaataagggacagcttattcagaaagcatttcaagatggcaacagtacagcattaaaccacctgtggggcccttctgagcacagggccctgtgtgactgcacaggtcacatacccatgaagtcaaccctaagtgtaggatagtattctatgacaaattatagactaataaactatattgcctagtacatgtcatgatactactaggcctttcaatgtggttgtttatttgttcgtttttttgagatggagttttgctcttgttgcccaggctagagtgcaatggcgcaatctcagctcactgcaacctctgcctcccaggttcaagtgattctcctgcctcagcctcccaagtagctaggattacaggcatgggccaccacacccggataattttgtatttttaatagagacagggtttcaccacattggtcaggctagtcttgaactcctgacctcaggtgatccacctgcctctgcctcccaaagtgctggtagtataggcatgagccaccatgcctggcctcagtgtgttttcattctatgttggacatttggcatgcacagaattacatttcattttaaaaattactgagcattgtctacatttgtactatatgctgtagggaatctttgctaacatttaatcaagcacataaatacctaatcaaattttttaaatgttataaaaagttagttataattcttccacttttccccacaagcctaaggcgcagagcagagactgaaactggtaggcactcaataaacacttgttgaatgaatgcaagaaggctggaaagtccaatatcaaggagttgttatttggtgagggccttcttgctgtgtcatcccatggcaaaaggcagaatggcaacaaaagagccaaattttattcagccttaaaagtgaaggaaaggccaggtgcggtggcttatacctgtaatcccagcactttgggaggccaaggcaggtggatcacctcaggtcaggagttggagatcagcctggccaacatggcaaaacgccatttctactaaaaatacaaaaaattagccgggtgtggtggtacacacctgtagtcccaactacttgggaggctgaggtggtagaatctcttgaacccaggaggcgaaggttgcagtgagctgagattgcgccactgcactccagcctgggcaacagagcaagactctgtatcaaaaaaaaaaaaaaaaaaaaagaaaagaaagaaggaaattctaacacatgctatatgagggcattaagctaagaaacaagccagtcacaaaagtcaaatactggaagattccacttatatgaggaagttagtgtagtcaaaatcataaagacagtaagtagaatggtagttgccaggggctggggggagggaggaatggggagttattttttaattagtatagagttttagttgtacaagatgaaaagagttctggaactagatggcagtgatggttgcatattatgaatgtattatcactaaactgcacactttaaaatgtttaagatggtgaatgttcttatattttacaactaaaaaaataaaaaataaaactacacatagtgaagaagtaggaaatgaagttgcaaccaaacggatcaatattttgagtgggaaatctaatacttaattcagtgctaatttttatatttttagtagagacaaggtttcaccatgttggccaggctggtcgtgaactcctgacctcaagtgatctgcccgcctcggcctcccaaagtgctgggattacaggtgtgagccaccgtgcccggcctcacgcccttctcttaattccattttctctcccctctgccccttaatacactgcacttaaccttgtcataagccaaggaggacctgaaataagaatactcaaaacacggttgaaataaacaagaagacagaaactaaagccagcattttttttttaatgcttggtaactgtccctttgtgtctccctaagtgcaggataaacttcttggggcaaatacaaacgtttgataaaattctgggccaaggagtcctgcactggatatattcaacaaattacctgccgatgataacagcgtaagtcaaacgagttctaaaagtaacaaatgacttagttatctggataaatccgtccttccttttctttttcacctagcccttttgtcgggcctctaaaatgtaggataactacgtgggaaagcaagcagcggctggtggtgtgtttttaccctgattttatcactccaagtatctaccgtggctggttttgcgaagactagctttgtatcagaatgaggtgtggctggaacgcctgaggaaagcaaaccaagttttccagaggacgccgttgacagcgtctccgcacaccgcgccggggtaggaacttcctcccgcctggttmgcccggyggggaaccaataaagttgagcgcgttcaaaggggtcctaatcttccagggtccgctgggcaggcctgcaaaataaggcccctagaaactccctgaggttttcaagtcttctccctctcctcggaattttttccccttcattcgcattacttttattctgacggaaacggcgcgggctaggccccaggaggggcgcatttcaggtgcaactggcccggcgawcgcggygggcaacccctacgaggcccccggttgactagkagctggcggtcmgagctgtggcttgraagaccgacgcgatgaagcccagacctgcagrgttcgtggataataaactcaagcagcgagtcatccaggtgtgtattctgcaccgcttggcctcgccaagggccccgatcgctgccccagggtgccactccccttttgtcgggtggcatccaggtggaactcaactagtcttctttccccagtctgggtctgggcgtgcgtctgtttctccttagttggtgctgccggggccttccctacccacgttggtgcggagtctcagggagaagccggggatggtgggagggtgcagcttggtagggctgcccaagttgtctggtcgtcttcagcgcagatcattcagtagagtggaggtagcctttgaattttaacctctttggcttgtgaagttagcacaggaatggtcttcaaacgctcgcattgtaagaggtccttgagaagggrtggcataaataatatgttaatttccgttctcaaggaacttacacactaaaacgagataacatgggtctggcaacagtaacaggcactttgcctacggttttctcattttcatgaccatcagtaaaaagcagtgtgtggcaaatacctcagaatgtaagcaagcagtctgagttaaaaggtgggagagaattttcttcacttaggaatttgtgagctacacattctccttgtttttctttcacttcaccagcccctaaacaatctccttttcggacccatcttttcctaccaacttgtaaatgttggaagtgctctgtgccactgttctcttacctccccttcctctttcctcatacacctttcttatctatccatacttcctatgtgatctcatttagtgtaataacctttgagtagtatctacatactctattatctatgtatttatttcattttatttttatttttctgagacatagtctcgctctgttgcccaggctagagtgcagtggctgtttatgggcacaatcataactcactgcaccctcggcctccctgactcaagtgatcctccctcctcagcctccccagtagctgggactacaggtgtgcaccaccacacctggctaatttattattattattattatttgtagagacggggttccactatgttactctggctggtctctaactcctgggctcaagcgatcgggcctcagcctcccaaagtgctgggattaccggtgcaagctgctgcactggcctctgtatatttatgactgctaactttatatctccagtccagattttatcttgaagtacagattgatatatccagctgcctagtcagcatatctccaaattaaaatggccaagtggaatttgtgatttttttcttccttcaaatctgccctttcttagtgttctgtatctcagtaaatgatactaccgttcgtcctgttgttaaggccaaaaaccttaaggatcattctgagtctttcatttcctgtataccatctgtcaacagcctggttggctttactttcaaaatatattccaagtacttcttactgtctttccctgtaaccatcttagtccaaaccatcatctctaccttatactattacaatagcctcctaactgatctctctgattctgcttttacctaaagcctattccccacagagcagccagagacatctaattttttttttttttttctgctcactrcaacctctgcctcctgggttcaagtgattctcctgcctcagcctcccgagtacgtgggattacaagtgcatgccatcacgcctggctaatttttgtatttttagtagggatgggatttcaccatgttggccaggctagtctcgaactcctgacctcaggtgatctgcccgcctcagcctcccaaagtgctgggattacaggcgtggccaagacatccttttaaagggaaaaatcgggctaggggagggatagcattaggaaaaatacctaatgtagatgacgggttgatgggtgcaggaaaccaccatggcacctgtatacctatgtaacaaacccgcatgttctgcacatgtatcccagaacttaaagtataactaaaaaaaagtggggggaaatcagagcttgccatagccctgctcaaaacctttcagtggagtcacagacatctagagtaaaacccagtctgaaaagccctgcatattctggcctctgttgtcctagtttacttttcctctcctgtcccagccacacagaccttctcaaacatgccaagcacaggacctttgttctcgttgttcagtcactctgaattactcttcctctggatgttcccgcgtcccacaacttgctccttcactttattgaggtttctgagcagtgactcctaattactggatctagtggcctcttctctgtcctcacacttgactcttttcagcgtttgacattatcagttttcctctatagctttcactttggttcattataaaagtacaaatgaatatcccttattctaaatgcttaagaccaaaaaatgtttcagattgatttttttcaggttttggaatgtttgcatatacataatgagatatttggggatgggacccaagttaaacatgaagtttatttatgtttcatatacaccttacacacatagcctgaagatagtcttacacaatattttaaataaattttcacttagctatatatttaatttaattttaattttttatttttgagactgggtctagctctgtcacccaggctggagtgcagtggtgtgaacactgctcactgccatctcaaactcgtggggtcaagtgattctcccacctcagcctcccatgtagctgggaccacaggtatgcaccaccatgtctggctaattttaaaattttttgtagagatgagatcttaccaccttgcccaggctggtctygaacacctggactgaagcaatcctcccgccttggcctctcaaagtgctgggattacgggtgtgagccaccacgccygggcttatttatgtatttatttttgagataaggtctcgttctgttatccaggctggagtgcagtggctcgatcatagctcactgcaacctctaagtctgggcttaagcgatctcccaccttggcctcccaaaatgctgggagtataagcacaagccaccacatccaaccaactttttaatttttttgtagagatgaggtcaaactttgttgcccagggtggtctcaaactcctgggctcccaaagtgttgggattacagatatgagccaccatgcccagccaaaaggtgatttaatattgaaactaaattgcctcaagctagtagttctgcagtatctgacagatgtcaaatatcactgtgttccttgaagtttaaaatatcccctcctacccttatgagtttactgcagtgttctggggtgttyggaaacctaggatattagtaagtaagccctcacttactgccttataactattctgataattattagtattgtattatagtgattaataatgttaattaaattttctgatttcatatttgacaattatttggttacttttatttatgtttctggtacactttattaaygaagagtttatcttaaagtataatgtgttcagatagctcaatctgttgattaaaatcactgagtttgaaatattgggtgttttgtatttgttatattttctgttttagtaccttaccagtaacaaatgtggcaaatatgtggacattggagtcttagcgtctgatttacaaagagtgtacaggtaaataaatatagtttccggatccttggatttttatgtctcctttaccattttaaaagtttatatcctgcctaaatttccagttgatatcagtagctgctggcattagttcaccaatccataatcttggaactcaattcagttatgcaaacatttatcaaatacctattatgtgcagtaaaatgtcttttgtactgtgggaaatgggtcactgcttatcttttagtacctgacagtctggtcaagagatagagatgttattatatcacttcctttcctgctacattagaaaattaaaaccgggccagtcataatggctcatgcctgtaatctcaacactttgggaggctgaggtgggaggatggcttaagcccaggagtttgagaccagcctgggcaacatggtgaaaccccatctgtacaaaaaatatacaaaaatttgccaggcttggtggcatgcacctgtggtcccacctacttgggaggctgaggtgggaggatcacttgagcccaggaggtcaaggctgtagtgagctgtggtcacgccactgcactctaacctcagtgacagaataagatcctgtcccaaaaaagaaagaaaattaaaaccatcaccagcaggtatgatctccctgagtttcctgactcctttctttttgagacagaatttcgctcttgttgcccaggctggagtgcaatggcatgacctcagctcaccgcaacctccgcttcccaggttcaagcaattctcctgcctcagcttcccaagtagctggaattacaggcatgtgccaccacacctgggtaattttgtatttttagtagagacagggcttcaccatgttggccaggctggtctcgaactcctgacctcaggtgatccgcccaccttggcctcccaaagtgctgggattacagacgtgagccacagcgcccagcctctttttttttttttttaaatacagtttttatttttattttttgtggagacagggccttctgtatttgcccaggttggtctggaacacctgacctcaagtgatccttccaccttcgcctccctaagtgctaggatgacacgcatgagccaccatgcccagccagcttcctgagtctttttttttttttctgagacggagtcttgctctgtcgcccaggctggagtgcagtggcgcgatctcggctcactgcaagctctgcctcctgggtttaagcgattctcctgcctcagcctcctgagtagctgggattacaggcgtgtgctaaccacacccaactaatttttgtatttttaatagagatggggtttcaccatgttggccaggctggtcttgaactcctgacctcaggtgatctgcctacctcagcctcccaaagtgctggggttataggtgggagccaccgcacctggccaagaataccttaattatttctagaggctctatctccaaatgcagtcatattcagaggtactgggggttaggacatcaacataagaatataagggaaacacaattcagcttattggactctgtcctgtggctcccaaaattcrtggccttctcatgtgcagatacattcattccattccacaagccccaaaagtcttaactcattttagcatcaactcttaagtccaaactctcatctcaatatcatctaaatcaggccagatgcaaggactcacacctataatcccagcrttttgaggggccattggcttaaggccatagagttcaagaccaacttggggaacatagtgagaccccatctctacaaaatgaaaatagaaataattagctgggcatggtggcctgaacctgtagtccttgctactcaagaggctgaggtgggaggatcgcttgagcccaggagttcaaggttgcagtgagctatgattgcaccagtgcactccagctgggtaacagagcaagaccctgtctctaaaaataaaataaataaaaataatgttatctaaattaattggtaatggctgagattcaaggtatgatttatcctggggcaaaattcctcttcatctattaacctgtgaaaccagacaagttatctgcttccaaaatacaggcatgtgctatataacagtgtttcagtcaatgatggacctcatgtatgatggtgatcccataagattattacatcatatttgtactgtaccttttctgtgtttagatatgtttaaawacacaataccattgtgttacagttgcctatagtatttagtacaataatgtgctgtataggtttgtaggcacagtaggctataccatgtagtctaggtgtgtaataggctagcccatctaggtttgtgtaagtatactcttacttatttttgttttcacacaatgaaaatgcttaatgatacacttctcagaatgtgtctccattgtttagtgatgcacaattgtacaatggcaggacaggcataggtgtaggttagacattcattcctattctaaaagagagcaattggaaaaaagaaagggtcatgggtcccaagcaaatctaaaaccaagcagggcaaatgtcattagattttcaggtgttagaataatcctctttggcttgatgccctgccctgtgggctccgtagggtggtgatcctgccctgttacctaggaggaggcagccccacctgccggacctgtgccctctgggtttgtgttggcagtggcagccctgccttcttttgagcctcctgaagggtcgttcttcccttttcttgaaggataacttgtgttcacaactggatggttttattggccctgtcctatagaatcctggaagtccaacagccttccttaattttgtccccatctcggtcccttcagtccaagctggcagtgtttctgttgctttaaccccatgtctattcctggcttctgctaagatggctgactggatccataagtcatatgctggtaatcgctttagcaaattgttgtccccccacacccttgatgttctctttagattatgctttttcattttttacaatatggataaactgagaattttccaatcttcaggttctagtttcctttttgttgaacaattccttctttatgtctctctatactgtaaaattttactataagcagcaaggagaaatcaggccacacttcaacactttgcttggaaatgtgagtgaaatatctagattcatcacttacaagttctacttttaaaacagtaaaacacaagtcctctgccacttcgtaacatggactgcctttcttccaatttccaatatcctgcttctcatttctgtctgagacctcaccagaagcatctttaacattcatatttctaatagcattctctctctgtgtgtatataactatagaaccttcctgtacagctcttctcttgtctttctgagctcttaccagaattgccttccgtgtctttttttttttggagatggagtctcactctgtcacccaggctggagtgcagtggcgcaatctcagctcactgcaacctctgcctccctggttcaagcgattctcctgcctcagcctcccgaggggctgggactacgggtgcacgccaccatgcctrgctaattttttgtattttagtagcgacagggtttcactgtgttgcccaggctggtcttgaactcctgagctcaggcaatctgcccgcctcattctcccaacatgctaggattataggcatgagccaccacgccctgcggtgtccatatttctaacagcagtcacttcagagccatctaggtttcttctaacatgcacctcaaaactctctggcctctactacctagttctgaaaccatttctacattttaaggtatttgtcacagtagcactatacttatcaataccaaaatctgtattaggaaggaagaaaagaagagaaactaagacagaaagctttttaaaacaatagtatacctcactttggctaccactcagtagtatttttccttcccctgatcagaatttatttaatgagtggtctaaggccagggcacagtggctcacacctgtaatttcagcacttagagaggctgacacaggaggattgcttgaggctaggagtttgagaccagactgggcaacatagcaagattctgtctctaccaaaaaaaaaaaaaaaaaaaattagcgtggcatgcacctgtagtctgtcttagctactcaggaagttgaagcaggaggatcacttgaggccaggaattcaaggctgcagtgagctacgattgcaccgctgcactgaagcgtgggtgacagagcaagaccctgtctcttaaaaaataaaaataaagactaaactaagattgtttctatccccgccactcactccattgaaatctgtgagttgtgttttgttggtaaccttttttcttagttggtggtatgactgttactcagccagtcacccaggttaatctgtatgttgtccacttccttctacctagccttgaatccccctgccatgtctataataagtcaccaagaagccttgctgtggtctcttaaatatttcatgatgcctgttctctcctttccctaccattactatactagcctaatccagagcctcattatttcttgtctagactactgtttcagtttttttttttttttgagatggaatcttactctgttgctcagggtggagtgcagcggggcaatctcggctcactgcaacctccgcctcctgggttcaagtgactctcctgcctcagcctcccaagtagccaggactacaggtgtacaccaccacaccctaaaaatttatttaaaatttatttaaaaattattactaaaaataatttttgtatttttagtagagatgtggtttcgccatgttggccagtctggtcttgaactcttgacctcaagtgatcctcctgccttggcatcccaaagtgttaggattataggcatgagccactacacctggcctgtttcagcttttaaacattctgcctacatccatctgccatcttctcttatccaggtgttggcaaactatggccctcaaaccagttcctgcctaccaccttgttttgtatggctcatgagtgaagaatcgcttttacgtctttctttctctctttgtttaatttttaattaattatttatttattttttggagacacagtctcgctctatcatccaggttggagtgcagtggctcaatctcggctcactgcagcttcagccccctgggctcatccttctgcctcagcccccagatggctggaactaaggcacatgccaccakgccccgctgattctttgtattttttgtagagatggggttttgccatgttgcccagctggccttgaactcctgagctcaagtgatcctctcgcctcagcctcctaaagtgctaggattccaggcatgagccaccgtgccaggccccaagttgcctttttaaatggtcatgatttagtacaatatttgcctcatctaaaactttgtgttttgaagtaatttcacatttaagaaaaactgacccagacgagcttagacaacatagtgagacccccatctctgcaaaaaaaatcaaaaaattaactaggtgtgctggcacgtgtctgtcatcgtacctactcggatgctggggtgggaggattgcatgagaccaggaggttgaggttgtggcaagctctgattgcacaactacacttcagcctgactgagtgagaccctgtctcaaaaacataaagttttttttttttttgagatggagtctcactcagtcacccaggctggagtgtggtggtgtgatgtctgcccactgcaacctccacctcctgggctgaagtgatactcctgcctcagcctcccaagtagctgggattacaggcacccaccaccatgcctggctgatttttgtatttttagtagagatggggttttaccatgttggccaggctagtttcgaactcctgaccgcaaatgatccgcccatcttggcctcccaaagtactgggattacaagtgtgagccactgcgctggcacagatttttataaagaggaaaatggaaaaaatagtacaaagaacacccatatactctacctagaatgtccctttatccatgcatactatctattccctaaggacaaaggcttttattatataaccacagtttatttattaaaaccagaaaatgtaatcttgattcagtaatattatcgaatccaccattcatattcagagtttgcctgtctcaataatgttctttatagctattattttatcggaattttttttccagaactgaaatccagcccctaaattatgcttgttttgctttttagtttcctttaatctgcaacagttcctcaacctttttttgtttttcatgatctttacatttttgaagattacaggtagttactatatagaatatccctcaatttggatttttctgctgttttcacatsgttggaatcaggttatatgtttttggaaggaaaaccaaagaagcaatttgacttcaaaaggcacagaatatctgtgtggggtgttattcggtaatgttagttttgatcgatccactgtaaattaatttgaaattaataaataatttataagaatatattttcagattatacaaatatcctgtactcatcaaactttcacctatatttttagcagatggtcttgctaaaaatgtttaacttgaatttaataatgaggagacataaattcagattgtgggacattttataaattagctggcctggatccttcaaaaatgtcagtgttacatgcacaaaggtgaagagattattacaagttaaaagagtccaaagagacacaacaaccaagtaaatgcatgaaccttgactagactctgggtcaaagaaaaacaactatatcctgtctctactaaaaatacaaaaaaatagccgggtgtggtggcaggcgcctgtagtcccagctactcaggaggctgaggcaggagaatggcgtgaaccccggaagcggagtctgcagtgagccgagattgcaccactgcactccagcctgggccacagagcgagactccgtttcaaaaaaacaaaaagaaagaaagaaaaacaactataaagaccattttttgggaataatttgagaaattttaatatggactgtatattagataatttatcaatattaaatttcttatttgtgctaattgtattgtagctatgcagatatcctttttttttttttttttttttttgagacggagtcttgctctgtccccaggctggagtgcagtggtgtgatctcggctcactgcaacctccgcctcctgggttcatgggattctcctgcctcagcctcccaagtaactgggaccacaagtgtgcaccaccacacccagctgatttttttttttttttttgagacggagtctcgctttgtcgcccaggctggagtgcagtggcacgatcttggctcactgcaagctctgcctcctgggttcacgccattctgttgcctcaggctccccagtagctgggactacaggcgcccaccaccacgcctggctaattttttttttttttatttttagaagagacgaggtttcaccgtgttagccaggctggtctcaatctcctgacctcatgatcctcccacctcagcctcccaaagttctggaattacaggagtgagccaccgcacctggctgcagatattcttttttaaagagatacatgctgagaatttttgagacgaagggtctgtaacttagtttcttcttcttagttttttaatttattattttttttgagatgagatcttgctctgttggccaagctgagtgcattggcgcaatcacggctcactgcagccttcacctcccagactcaagctgttctcccacctcagcctcccaagtagctgggactacagccacgtactaccatacctggctaatttttaatattttgtagggatagggtttccctatgttggcagggatggtctcaaactcctaggctcaagtgattctcccacctcagcctcccaaagtgctgggattacaggcatgagccactgtgcctggcctagaacttattttcaaatggttttgctctacccctccaaaagaaatctctatatgtagacagaagtaaagtaaatgtggcagtttgagaatactataggtaaagaatatacgagtgttgattacattatttctttcatatttttagtaactttgaaattttaaaataaaaatatttgaagcaaaaaaggttagtttaaaaaaagggggaaaatggagaaaggtcacaatagtaaatatataaacttagaagtttgaaaatagggttatggcaagtgtctatactgtaacaatgaaatattcatgcaaatttatttgatccatttagattgaacttaatggaaaaatattggtggagactactatggtaaacttcttgttttcttttttcagtatagactatggtcgaagaaaaagaaatgcttttaggattcaggtagaaaaaggtgagtcttttattgttagagctaaattatcaataaagttatacaaacgattgttttagctcatagcgtttttctttttgtttcagtatttagcataattagtagtgagaaggaacttaagaatttaacagaattagaagatgaacatttggcaaaaagggcaagacaaggtgaagaggataatgagtaagtataccaaatgcagggtttttttaaaccatgaactttatcatgttacattcctgcttgtaaaactttcagtggctcttcattgccaacaaagccctgcgtgatatttacctaacctcttcagccatattgaatgttctttattccccaaagagatcaaattctctttggctgtgcctttgtatgggtggttttattgagttagagtgkcatttccctttcacaaactcccacacagccctcaagaatcagttgaaatgttactgcctttattaggcctaagacccctttttaaatgtttccttagcttctagttacagatatttgttataatccttatcatatcatacggcattgaaattatttgcttacttgtttgcattaccaacagtactgtctcattaccttctttttctgccctaatacaatatcagatatataaaaaggtgctgattaattttgtttaagaaatagtattgagagtttaaaaaatagctttattgaggtataattgacatcagtaagctctacttttttttttttttttcttttgagattaagtctcactctgtcacccaggctggagtgcagtggcaccatctcggctcactgcaacctctgccccccgggttcaagcgattctcttgcctcagcctcccaagtagctgggattacagtcatgtgccaccacacccggctaattttttatatttttggtagagacggggtttcaccatgttggccatgctggtctcgaactcctgacttctagtgatccgcacatcttggcctcccaaagtgctgggattacaggcgtgagccattgcgcctggccaacctcttcatttttaaagtgtacaatttgttaagttttgacatatagatatactcactgaactatcaccataagcaagatactgaacctttccataaatatcaaaagtcttcttgttccgctttgcaattcatttctccctccacccctgcttctaggcaaacttttttctttttctttttttttttttttttgagacagggttttactctgtcacccaggctggagtgcgatcacagctcattgcagccttgacttcccaggttacttgattcttcttcagcctcccaagtagctgcaggcacatgctaccacacctagctaatttttcgtagaaatggggttttgccatgttgcccaggttggtctcaaactcctgggctcaagcagtctgcccgcctcatcctcccaaagtgttgggattataggtgcgagccacagcacccagctttaggcaaccattgatttgctttctgtcactgtatgttacactgcattttgtagaattttatttggaatcatacttttaaagtctggattctttcattctttcacttagcatgattttgagatttatcaatgttgtgtgtatcaatagttcattgctttttattgataagtatgtatggacatgctgcaattattttatctatttatctgtttttttgtttgttttttttgagacagagtctcactttgttgctcaggctggaatgtagtggagaggcatatcataactcactgcagcctctacctcctgggctcaggcgattctcccatacgggtgcatgctaccatgcccagttaattttctaattttttgtagaaatgggggtctcactatgttgtcaggctggtcttgtacccctgggctcaagcaatcctcttgcctcggactcccagaatgctgggattacaggtgtgaaccaccttgcctgacctatctgtttatctcttgttgggcagttggtttgtttccagtttctggctattacaaattaagctgctatgaacatttatgctcataaaattctacaaaatgcaatgtaacatatagtgacagaaagcaaatcaatggttgcctaaagccaggtctttgtgtggacagtattttcatttcccttgttaaatatctaagattagaatagctgggtcgtgtgatagatgcatatttaagaaattgccaaactattttccaatgtctttataccattttacttttacattagcagtttatgagaattctactctttccacaaattgctgatatttgttatggtcagtgtttaattttcagtagtgtttcactgtaaatatgacattagctttaggtttttttgtagatgtcctttgtcagattgaggaagtttcctaatattcctagattgctgagaatttttgtcatgaataggtattgcatttgtcaaatgcttttctgcatctgttgaaatttctcattatggcctttcccctttagtctattagtttgatgaattacattggttcccagtattaagccaatcttgcctcctggggataaactctacttggtcctgatatgttatctttttaatgtattgttggcagcttgggcaacacagcaagactctgtctctacagaaaatttaaaaattagccaggcatagtggtgcatggttctatcccagcttctttggaagttgaggtaggaggattgcttgagccccagagttgaaggttacaatgagctataattatgccactgcactccagcctgggtgagagagtgaggccttgtctctaaaaaaaaaaaaaagaaacagagttatttgtaaagagtatttgtttgacgttgtttttttgagatggagtctcactcttgtcgcccaggctggagtgcaatagcgtgatctcagctcgctgcaaccaccgcctcccgggtttaagccattctcctgcctcagcctcctgagtagctgggattacaggcacatgccaccatgcccggctaatttttgaaaaaaagggtattaattggattcgatttactaatctttttctacagatgtttgcatctgtatgtcatattggtctgaattttcttttgttcatttttggaatgtctgtcatattttggtgttagggttacaccggcctcatgatattagtgggaaagtgttcttttgttctctattttatgaaaacacattatggaaattcttttttgaatatttgttagtgttcgaccacagtttttctaggcctagagtcagcttccccccgagtcttctttttctgaaggatttcgataaattttaattttgctagatatacagctcttccttacatctctccttatgtcaattgtgataaattgtattttttaatcatttgttcattttctctcaggtgtggaatttgttggcataatgcttctgcaatattctcttgttatccttttaatgtctacaggatttggggtgatagccccattttactgtttgtagctcagcctttttcatttagatttatcataattttcttaaccagttccatattcatggatatttatttgtgttacacgattgcataataaataactctttactgctttactgcatatatctttgtacacatcacttttttatgttgaatttttgaggtggaatttctggggtcaaagatttatatttttgagatttccagtgcatttggacttaccttcctaaaaaggttgcctcagtttatactcccaacaactttgtataaagggcacatttctctgcatccctgcaatctttgttatactataatttaatctttgctgtttttataggcaaaatattgatcatatatattttttctttttttgagacagaatctcgctctgtcacccaggctggagtmcagtggtgcgatctcgactcactgcatcctctgcctcccaggttcaagcaattctcctgcctcagcctcccgagtagttgggattacaggcacccaccaccactgctggccaatttttgtatgtttagtagagacagggtttcaccatgttggccaggctggtctcgaactcctgacctcaggcgatccgcccaccttggcctcccaaagtgctggggttacaggcttgagccaccgcctctggccttgatcatatttttatttgtgattttataattattgaggttagtttttttgttatttcatatttgttttgcgaattgcttgcttatggagttttttctatttcatttgagaggtatttgcattttccttattagttgtcagagggttttgcataaaataatacctctttatatgcattacaactgctttccccatgttgccacttcttttttaattttcgcttgcaccatcttttgattagagaagttttgcatttttatgtagtcaaatctatcagtctttttccttttgttttatgctgatatgcttagaaagacctctctcacaagagtgtgtaaaataattacttacacttttttcttctttctttatgtttaactctttaatccacttggaattttttttttctttttttagggcatgagttgtaaggcaaaacttttttttttttcaaatagttgaatgatataccttatttacattgattagaattgctcccaagtaatgctgattaattttaatgaatacagaatttgcttgttttttttttttttttttttttgagacagcgtctcgctctgtcacccaggcttcagtgcactggcacaatcatggcttaccgcagtcttgacgtcccaggcccaagcgatcctcccaccgcagcctcacaggtagctgggattacaggtgtgtgccagcatgcccagctaattttttaatttttttgtagagacagagtctcccttagttgcccaggctagaatttgtatcttaatatcttaattataacagcatttcattgcattcatataaagctttctacctaaaaaaaaaaaaaaattatttaaataagaaaagggctttttttttttcttatttaaatagttttttttttttttttaggcagagtctcgtactgtgggccaggctggagtgtagtggcacgatcttggctcactgcaacctccgtctcccgggctcaagtaattttcctgcctcagcctcccgagtagctgggattacaggcgtattttcaccacacctggctaatttttgtatttttagtagagacggggtttcaccatgttggccaggctagtctcgaactcctgacctcaggtaatccacccacctcggcctcccaaagtgctgggattacaggcgtgagccaccatgccgggcctatttaaataatttccaaagaagtattaaatactagcagtgtcctgaagttacttgaagctattagataacaactttcagttataatgaattaagactacattctcagcttgtagtttattaggctttatacctcttttttgatacaggaaatttatttgctccttcatccctcatgaacagtcttgcagaagttgtatttggttacatgctttggtcatgttgactttgtgaatttgttactcagagtacttaattataggttgctgaaatatttcctctacctgaatctgatatccctaaatgggacccttgggcctgagggaatttgtatctcacttttatttattgctaggataaatataactataatttattttgcatttattatattttgtaaatgcataaggactttgcaagtgtttatttaatcctttaataaccctgggagacagacattacttattaaatctccgttttatagataaggaagctgacgcttagagaggttaagtaataactggttaagttggattttgaatcctagtttctctgattccagagtttggactcttaaccaccataatcttttggctgaatatatttacttgttttgggtagtcatttttttaggatatgggagagaaagtctttaaaacatttttccctccttttactgaggtatactgaaagctattctgatgatgattcaagtatggaagactacccagatccacaggtaagccaaacatttagtgggtccacttagattttttcttttttagttgttatggtacctcccttgaaaaactcagtattagctggacatggtgactcacacctctaatcccaacactttgggaggctgaggcatgcagatcacttgagcccaggaatttgagaccagcctgggcaacatggcaaaaccttgtctctataaaaagtatgaaaaaataagtctggccaacatggtgaaaccttgtctctacaaaaaatacaaaagttagccgggcatggtggcatgcacccgtggtcccagctacttggggggctgaggtgggagaatcacttgagcccaggaggtcaaggctgtagtgagctgcagtgagccgtgattgcaccactgcactccagcctgggtgacagagtgagaccctaccttttaaaaaaaaaaataaggctagctgtcgtggctcacgcctgtaatcccagcactttggaaggccaaggagggtggatcactttagcccaggagtttgagaccagcctgtgcaacatggcacaaccccatctctaccaaaaaaccccccaaaattagccaggtgtaatggcttgcacctgtggtcccagctactcaggaagctgaggtgggaggatcacttgagcccaggttgcagaggttgcagtgagctgggattgcactactgcactccagcctgagcaacaaaaccagatcctgtctccaaaaaaataaataaataaaaatcagtaaggaatagaataaaaggccaggggttatggctcacgtctgtaatcccagcactttgggaggctgaggcaggaagatcacttgaagccaggagtttaagaccagcctaggcaacctagcaagactctgtctctacaaaaaacaaataaaaattagctggatctggtggcatacacccatagtcctagctactcaggaggctgaggctggaggatcgcttgagcccaggagtttgaggctgcggtgagctatgattgtgccattccacttcagcctgggcgacagaccttattgcaaaagagagagagagagaggagaaggaaagaaagagggaaagaaaaaaaagggttagggctaaagggagggagaaaggaaggacagggaatagaataagagacttcggaagtcttcatcaataaataattgaacactttctgtgttcagtgttggtgatggattaaccatccttccagtatttatgtttataagtcagttatacaaggaaaaagaagggaagagaatagctagaaataagggcagacaagaatagagtaattaatagtaaaaatggaaaaagggatatactttttgtcaaggagatggcattagtaatgaaaaggcttgattaaaggagaatatggagataatatagtcggccctcactatccatgggggattggccccagagccccacatgaatacctgcaaatgctcaagtcccttacataaaatggcatcatgtttgcatataacgttatatacatcctcttgtatactttaaattatctctggattacttgtaataatacaacgtaaataagatgtaaatagtttttacactatatttctttctttttttttttttttttttgcgagggagtctcactctgtcgcccaggctgaagtgcagtggtgtgatcaccgaggctggagtgcagtggtgcgatctcggctcactgcagcctccacctccccagctcaagtgattctcctgcctcagcttcctgaggagctggaattacaggcagggtctcgctctgtcacccaggctggagttcagtggtgtcatctcggctcactgcaacctctgcctcccaagttcaagtgattctcgtgcctcagcctcctgagtagctgagattaaggtgtgcgccaccacacctagctactttttggcatttttagtagagatgtggtttcaccatgttggccaggctggtcttgaactcctggccttgagtgatccacccaccttggcctcccaaagtgctggaataacagacatgagacaacatgcccagcatacactttatttcttaaaatttgtattatttttattggtgtactgtgttttttaattgctttttatttcccaaatattttccattgaggttcattgaatccctggatgcagaacccttggatatagagggccaactgtttgtcaaattatttataatttgctttttattttttcccttggtatataagttttgaatatattatcaaaatatttgatccagttttcacggggacagggtctcgctctgtcacccaggctggagtacagtggcgtggtcctagctcactgcaacctcaaactcttgggctcaagttgtcctcctaccttagcctcccaagtagctaggataacaggcatgtgccaccatgcctgggtaaattttaaattttttgtagacacagggtctcgctgtgttgcccaggatggtctcgaactctaggcctcaagcagttctcccagtttggcctccgaaagcattaggattacagggcgtgagctaccacgcccagtcccaattttgctttgatggaataacagtgactctcattggcaaccagctcattttcatacttctttagtgtattttttttcgaagcaaccatacttactttattttatttaaccaccaattatgaattggtttccattggaatggagtgaagtcttttttttttttttttgttgagacagagtcccgctctgtcacccaggctggagtgcagtggcgtgatctcggctcactgcaagctccgcctcccgggttctcgccattctcctgcctcagcctcccgagtagctgggactacaggcgtccgccatcacgcctggctaattttttgtatttttagtagagacagggtttcaccgtgttagccaggatggttttgatctcctgacctcgtgatccgcccgcctcggcttcccaaagtgctgggattacaggcgtgagccactgcgcccggccgagtgaagtctttttgaatagtaaatgcttgtttgtgagtcatcttattgtgaacacccatatattcttttctttttttttttttttttgagatggagtctcactctgtcacccaggctggagtgcagtggtgtgatctcggctcactgcaacttccgcctgctgggttcaagtgattctcctgcctcagcctcccaagtagctgggattacaggtgcctaccactgcgcccggctaatttttgtatttttactagagacggtgttacaccatgttggctaggctggtcttgaactcctgacctcaagtgatctgcccacctcggcctcccaaagtgctgggattacaggcataagccactgtgcccagcctaacacctatatattctgattataaatgttctgagagaagttgttaaaaaacaaaatatagaaaacttattactataggcaatacaacttttatgagtacctgttgagtaatttatgctacaattttgttttatctttctgccagtcagcaaatcacatgaacagttccctgctgtctttatatcggaaaggaaatcctgattctgtttcaaatactcctgagatggagcaaagagaaaccacctcttcaacaccacrrataagttccaaaacaggctccattcccttgaagacccctgccaaagattctgaaggaggatggtttattgacaaaaccccaagtgtaaagaaagacagttttttcttggacctgtcatgtgagaaaagtaatcctaagaagccartaactgagrtacaggtatttttgtaatgaaattttagccccatatcatcgaagtacatttcaaccttttagttgaatrtaatrtcaatcagatacttgtgttttgtggaaggcataggaactttaaaatatatggagaatttgatcacattgcactgctttccattctttctatcctagtctaagccttttctcattcttgacttaattattgaaacagccttctagctggagtctgtgtcctttcttgttcccctagtttattctttacacagagagatagcttttttttttttttttttttttgagactgggtctggctctgtcgctgaggctggagtgcagtggtgtgatcttggctcattgcaacctctgccttccaggctcgagccatcccccacctcagcctcccatgtaactaagactacaggcatgtgccaccacacctagctaacttatatcttttctagagatggtgttttgcagggttgcccaagctggtcttgaactcttggggtcaagcaatccacccgcctcggactcccaaagttctgggattgtaggcgtgagccaccacatattatcattcttctatttaaaaccctccagtggcttcattcagtttcaaatccaaaggcctgtgacagccactaacrtcctttatgatttcgctgcctgactttcttttcagtttcatctcctaccaccctgttaggtatgtgaatctatttcctcagctgtaaattttacaaactctaagtacaaatcaggtgtttcccatgaaaatttagggtccaaattgagatgtgctattaacttaaagtgtacattagactttgaagactcactaaaaaaatagaatgtaaaacatctcattaataatattttatattgactgttgaaatgataatattttggatatactgggttaagtaaaatagattattaaatgaatttcatatgtggctcacatattcctcatggacaatgatgcttcaactgatttctaagaaccaagccctttgatttggcagaamctttcccctttttatttattaataggcctttccaaatctctttgctttaattatccatatcatccatctatagggaacattgttatggttggcaagaactcgagtcttaatgctgaaatactttttttggtttgagacagggtctgccttgtcacccagactgacatggtggagtggcatgatcacggctcactataacctccaccccctgggcataagccatccccccacctcagtcttccaagtagctggggactacaggtgcccaccaccacacctggctaagttttgtattttttgtagagatggcgtttggccatgttgctcagactggtcttgaactcctgagctcaagtgatccacccacctcagcctgaatcatacttaaaaacaattttttttggccgggtgcagtggctcacacctgtattcccagcactttgggagaccaaggcgggcagatcatgaggtcaggagattgagaccatcctggctaacacagtgaaaccctgtctctactaaaaatacaaaaagttagccaggcgtcatggcgggcgcctgtagtcccagctacttaggaggctgaggcaggagaatgacgtgaacccrgcaggcggagcttgcagtgcgctgagatcgtgccactgyactccatcctgggtgacagagcgagactccgtctcaaaaaaaaaaaatttttttttaagagttggaatattgctacatcacccaggctagagtgcagtcacttttcacaggcttgatcacagaacactatagccttgaaaccctgagctcaagtggtccttctgcctctcaagtagctggggctacaggtgtgtcccagtgtgcttggctgaattacactttgttatgactgtcaaagcagctctgtagttatatttaatttagtgaatcatcagctgtcagatgaagacaactatatagaagactcagtgagaaaaggcaaatatcagtgtccttaatcaaggagctcacaattcagtgagaaagacagagataagtgaatcactcatacaaggcagattattccaactgataatagctgcaaatgcagtgtcttgggaatgtgaggacaagattaaatctaactgaaagagggccgtgcagggcggctcacgcctgtaatcccagcactttgggaggctgaggtgggcagatcacctgaggtcaggagttcgataccagcctggccaacatggcaaaaccccatctctactgataatataaaaattagctgggcatggtggtgggctacttgggaggctgaggcaggagaattgtttgaacctaggaggtggaggttgcagtgagctgagatcgcgctgttgcactccagcctgggtgacaagactgaaactctgtctcaaaacaaaaacaaaaacaaactctaactgaaagaatctggaaaagaagcggcattcaaatgttaagatttcttttttctttttttttttttccccatatgggatgcttcacaaatttccatgtcatccttgcacaggggccatgctaatctttgtatcattccaattttagtatatgtgctgccaaggccagcaccaaatgttaagatttaaactgagctttaagggaatgaggagaaggactttcacaatagacagcatctttgagcaaagaggttgggaatagttaacagaggtgaaagtgctagggcaggaatgaattttctttacaatgcccctctttwaaaagtaaaacaattattggcatagaattttaagcatggcatatttaaatttattttctttccaggattcaaaagattcttctcttttggagagtgatatgaaacggaaaggcaagctaaagaataaaggaagcaaaaggaagaaagaagatcttcaggaagtagatggagaaattgaagctgtcctrcaaaagaaaggtaaggtgtgagtcttgttggtggcagtggtcatgtttgcagtgagagaagcatcattctgtcccaagctattttgcttgagggaccttytatgtgcagaaatgtttaccaggaaatatttctatatttaatggacctttgtttacttaaagactattcattataattatgagttactactgaatcattaatmttttcatctcctcatttttgtttaccagctaaagccagggggttagaattccagatctccaacgtgaagtttgaagatgtgggaggcaatgatatgacattaaaagttagtgcaaattctgaattttacctcaaatggatatattactaatcagttatgagraaaaagcctacctctttgtttctaatatgatctgggtgtagaaaaggaaactgggaaggttgagaagggcaaacctgacctgtaccctttagggcattgcaggagaaaagatgcatactattttgaacttttctattattttaattatagtatatataagatccatgctttataagtaatattgtcttagcaatactaatagtaatggtaactttatttttatttattttttattttattttatttatttattttgagaaggagtgtagctctgtcaccaggctggagtgcagtggcgcgatcttggctcactgcaacctccgcctcccaggttcaagagattcttctgcctcagccacccgagtagttgggtttacaggcatgtgccaccacgcccagctaatttttgtatttttagtagagacagggcttcaccatgttggccaggatggtcttgatctcctgacttcgtgatctgcccacctcagcctcccaaagtgctgggattacaggcgtgagccaccatrcctggccgtaatggtaactttatttttaatgcctactctttttcatctgccatgctagttaactttgcattacatcctcaaggtatataatgttacagcttaggaaatagctcctcagagaggttattgctgaaatcacacagtaggtaccagagccaggattcaaagtctgatctaagtctaaggtgtatattctacctatctactccatttcactgctccgaaaaataggacatttcattctactttgattgttctgtcttgaaagacatctttgtgcttatcctctgctaggaggtctgcaagatgctcatacacatgcgtcacccggaggtgtaccaccacctgggcgtcgtgccccctcgtggagttctccttcatggaccaccaggctgtgggaagacattacttgcacatgcaattgctggggtgaggcttgctgacatttgtttgcttttgctgtttttgttgttattatttgtttttgttttttctctttggtcaacttaaaccagacatggcattcttcaggaagagaacatagtcattggaactgatccctttgttatcatgctggtattatttgtggtatttattcatttagtttatttattgtttctcacgagcaacttgagggatttttttttttaatgtatgtaattgtttatatggcaagagttagataaaaagtaaaataatacagtttttttttttttggagacagagtctcactctgtcacccaggctggaatgcagtgtcgtgatcttggcttactgcaacctccgcctcccgggttcaagcaattctcctgcctcagcctccccagtagctgggactacaggcatacgccaccacgcccggctgattttttgtattatagtagagacggggtttcaccctcttgcccaggctggtcttgagctcctgaggtcaggcagtccacttgcctcagcctcccaaagtgctaggattacaggtgtgagtcatcgcacccggccataataatacggttttaaacaaacctttttattaacacatagcttacattttagttactttgctttccctttaacccaatagttatttcagtttacttatttttttgagacagagtttcactgtcacccaggctggagtgcaatggtgcaatcatggctcactacagcctcaacttcccaggctcaagtggtcctcccacctcagcctcccgagtaactggaaacacagacacataccaccacgcccagcttatgtttttgtttttttgtagagacgaagcccactatgttgcctggctggtcttaaactcctggcctcaagcagtcctcctgtctcagtcttccaaagtgctgggattacaggcatgggccactgcacctgccctcccagtggttctaaggagcagtaaaataagaaaactagggttatattatttttcatatagctaaatttattcaaaatttttatttagagtcatgttcttatactttttagttttaaaataattctttctaaaatggtaataatagacacttactttgagaaattaaaagttagcaatcttattttaaccctctcagatttttcagaaactgtaggggacagtaatgtaaaatatccgagtaacttcgattagaaaaatagcatgctcgccgggcgcagtggctcatgcctgtaatcccagcactttgggaggccgaggcatgtggatcacctgaggtcgggagttcaagaccagcctgaccaacatggagaaacccccatctctactaaaaatacaaaattagccgggtgtggtggcgcatgcctgcaatcccagctacttgggggctaaggcaggagaatcacttgaacctggaggcggaggtcgcggtgagccaagatcatgccattgcactccagcttgggcaacaagagccagactctatctcaaaaaaaaaagaaaaaagaaaaatagcatgttataccaagcgctaatacaataatgttctatgaaagaaaatcatttgtaaagggggacttgattggtttgcttcatttttgtttaataattccattacatgactgactactgcatgccagactttggaatatagtgttaagtaccacaatcgtagttctaatatgagagagacattaaacagtcattcatataaataaatgctgtacataataatgactataataaatggaagacaagaagaagtgcaaaatggtatgtggtatgttaggattcccaaattagagttgggttcaaggaaggtatggttgaggaagtgaaatttcaagataagcacaagaatgggagaacagtagtctctcttctctcttttttttttttttttttttttgaaacagattttctctctgttgcccaggctgagtgcagtggcatgatcacagctcactgcagctttgacttctcaggctcaaatgatcctcctgcctcagcctcacaggtaactgggactgcaggcatgcatcagcatgcctggctaatttattatttttttagaggtggggtctcactgtgttgcccaggctggtctcaaactcctctcaaagtgctgggattacaggcatgggcgtccacacctggcctcttcttaaagagtctccctcctctgactagtaactggctactctctgggttaggatttggagaaatactagcagaatgtgtgggaaacatctgtgtcacaacccttgctattttctccttagcagatgggtaagaattgttttgataggccaggaatggtcactcctgtatccccagcactttgggaggctgaattgggaggatggcttgaggccaggagtttgggaccagcctgggcaacatagtgagacacagtctctccaaaaaaaacgaagaattgctttggctcagccctaagtggggataacatacctcttgaaagtcaagaccctttattcagaaaagataatagaattttatagtgacatgtataaaataaaaacaagttgaaggtatccacttaaatgtgtttgcatgaaaccgttgattttttttttttttgagatggagttttgctcttgttgcccaggctggagtgcaatggcgcgatctcggctcactacaacctccgcctcccaggttcaagcaattcttctgcctcagccttcccaagtagctgggattataggcatgcaccaccatgcatggctaatttttgtatttttagtaaaaatggggtttctccatgttggtcagggtggtctcgaactcctgacctcaggtgatccgcccacctcagcctcccaaagtagtgggattataggcctgagccaccatgcccggccaaaaccattgattttcaaatagtgtttttcactgggccaacataaaaagatgaagttcctcaggaaactagctatttaaaaaatttgaggggactggataagaaaaagtagggaaattaaaatttgaatatttggttattcttttatgtgtctgcataggaacttgacctgccaattttgaaagtggctgctccagagattgtgtctggrgtatccggagagtctgagcagaagctgagagaactatttgagcaagctgtggtgagtcagttaatgactaatgccaggtggtcagacgctaccagcttatattaaagatcctgctttttctgatgctagtatttgttaacccactcactggccattcttttattaatataaacatggtaatttgctatgcatgatggctaaatatttaaagtagatttagtgataccagctgttggataaataacccttttcatttgaaatcaaacataaatgtaattggtgagaaattctgggccgtcataccctgtagtcatatgttgaaaatatattatccttatgatattttccactcacttttactttcctcaacttaagtttggccaaaaaaaacttgtaagcaatgtaaaaattgttatttaggctattataaaagcaaccataaaaataccagaataaattctgtcattccttactagtaaactagggcaataataatacccaaatctcacgtggctattgagagtattaaatgagagaattcttataaaaccttcgatatggtgccttgcacacagcacaagccctgtaaatattagctgtaagattattcacacttgaacaaatatcactgtgtttaaaactaaaaaatggtgaaaagtttatgtcattattagcaatgacaatatatagtagctgatgaatatccaatacaactgttagaagcctgtgtgaaattagaagagaaattatatttaagcagtaattgagaaaaaaaaaacattttaaataacaagaatgggtaggccatctacttagttatggtgcgggctgacgttgaaaaagctgtgggcaacactaggaggataaagagaaaaaaggtggaaagggcagagtgcagagcaaagctgaactttctcaggtgctacctgttttccaaaacgcggtggattccattgttaaattggcacgcatagccagagacaagtagtaaattttgtgcgtatggtaaacacgatgaataaggataagaggcaaatggcatctttaggttgttagttctgtgtttaaacctctcactaaaccagtactgagccagtacagtacctcacagtagatgctcagtaaatatgtggcctagcaccccgcttttcctggtcccctcttcgctaatgagaatgagtccagtaaagcatgtggatcaggaaacaaaaaggtgaaatccaatcaagtgatacttggttgaaaactatgctttctttaggccacattctgatgaccatcatttattcttttttttcccccattcaactttccaggtcactgacaagtactgatgtgcttgttttctggtgcttttggcctctgtaattttactcctttgtaactgggtaatatatctagcagtcataggcgtcttttgcaaacattgtcataaggatgattagggaagagatccagctagcgataagctaaatatctttccctttaagatgtggttgttcccatggttttgagatgccttaagcgacgctgacagccttacttagcataatcactgtcactcctaaccattgagtaactgattgagtaaaatgatttagattgtaaatctagataattttcttcaatttttttcattttaactgatccttatctcttttttgtggtaaaatatatataacagaatttaccattttaaacatttttttaagtttttgtaaattattttatgtcttccatgatgatttagagggactatcttcaaaccagtacagatatttcataaataatacctggctgttttctaaccaactgagtaatttgttgcataataagccacctcrcatctttcagcaagaaatacattaaatttgaatagtaaagatattacacaatgaattaggacaacaatttaaatttgctttaaatgtttctttgcggaagaggacactacacttctactcaatgaagagaaacatttttacagtccagaggtcttttattaccacstattatgccatgaattcacagggaagaggctccagcagttcaggctccttcctattggttctcagagtgcacttctctgggtggagcatgctgacactttccctttggtttcctttttctgatcattttcctccatgtgtttcagaaagctacctcggctcctagaatgcttaatgtgctcaatatgcacgttgattctcgcacacattgattctcttggcaagaatcttgcccttaacttgtttctttacaacaatgccagcagcatgctggataacgttatagactcttccagttttgtggtggtaacacttgtgggacattcctttttgaacagtacccattcccttgatgtctacagtatcacatttctttttctcttctcttcttttcttttttgagacagagtctcgttctgttgcccaggctggagtgcagtgggacaatctcagctcactgcaacctctgcctcccgggttgaagcagttctcttgcctcagcctcccaaatagctgggattacaggcatgcactacccaccagctaattttttttttttttttttttgagatggagtatctctctgttgtccaggctggaatgtctcagctcactgcagcctctgccttccaggctcaaataattctcctgcctcagcctcccgagtagctgggattacagacatgcaccaccacacctggctagtttttgtatgttcagtagagacggcgttttgccatgttggccaggctggtcttgaacttctgacctctggtgatctacccgccttggcctcccaaagtgctgggattacaggcatgagccatggcgcctggcctacaatatgacatttcttatagatttgcatacatatagccaaaggaacagctccatgttttctgaacggcctagagaacatctctcaggtgcctctcctctttctctttgtgttcatcattttggtgaattactggaagatggcagttccaactgaaaaggccattttaaacatttttaagtgtacaattctgtggcattaagtacattcatattgttgtgttatcattacccccatccatttccagaatgtcttcatgttcccagacagtaagtccccattcctctctcctaccagtccctggccatcaccaccattctactttttgtcttaatgaatttgactactctcggtagctgatccttacatcttaacttattctttctgaaccgtgtctagtttatttcttaaaaacaaaaaaactggaggtgatctttacactgatgtattagaactttaccatccttccttattcagtgtagcctttaaaataagcttccggtacttttcagtgtggatgctgggaaagttctggagatggatagtggtgacgtttacacaacagtctgaaaatatttaatgccactaaactatatacccaaagtggttagaatggtaaattttatgtatattttaccacagattttttaaaaagcttctggtgcttctcaaatttcctcttatagcaaattatagggaaagacttggagattcttacgttagtagaaaccctcataacgtttctagtgagcttgggtttgctaatttaaagtttataaacttgttgtcttaagtttttttttctgtgcatatgcttatccaaaatcattgtttctgtttcatagcatagcaaatgtatctaatttacraaagaatttcagtagatttatcacaaaacatgcattgatgaagagactataaatgtgttaccctatctgcagtctcttactgtgtacttctaatcatcttggttctcttaagtcaggtaaaaatcagaagtaacacatgtgaactgccttctttagggttattcttttggcaaatgatccttgaccttkaagattttttttaaaatgtatatgcttaattgtgcttcagtataggggatgcatttatgrttgtctttttgtgatatttttatttctagtcaaatgcaccatgtatcattttcattgatgaaattgatgctattacccccaaaagagaagtggcttcaaaagatatggaacgaagaattgtagcccaactcctaacctgcatggatggttagtttaaaataataaattcattttaagagaataaattttttaaaatagtgtaattaatacatgaagataaaaaataatattcatatagtaaatatcaaatagtgtaaaaaaaaagtcatactgggcacagtggctcatgcctgtaatcctaacactttgggaggctaaggtaggaggattgcttgagcctagtagtttgaggccagcctgggcaacatagcgagatgctacctctaaaaataaataaaaagaaatagcacttgttttgtgtacacaagaaaatttgaagtatatattttatgttccttgcattaccagattgtaggttgcttcttcttctgattgatggactgattgattgattgatgagatagagtgttgctctgtcacccaggctggaatgcagtggcacaatcacagctcaccgcagccttgacctcctgggctcaagtgatcctcccatttaagcctcccaaatagctgtgaccacaggtgtgcaccaccatgcctggcttttttttttttttttttttttttgagacagagtctctgttgcctaggcttgagtgcactggcatgatctcaactcgctgcaacctctgcctcctgcgttcaacctattcacctcctcagcctcctgagtagctgggattacaggtgcgtgccaccacacctggctgatttttgagacggggtgtttccatgttggccaggctggtctcgaactcctgacctcaggtgatctactggcctcagcctcctgaagtgctgggattacaggtgtgagccactgtgcctgggtgttttttttttttaaagacggtctcactatgttgcccaggctgatctcgaactcctgggctcagtctttctgcttcagcctcccgaagtgctgggattctgttttatttttatctaaaattttcttgccatgtctttgaggcctgcattctgagaaaatgctttcatggcttcctgctagctaaagaacacactgtggctgggcgcagtggctcatgcctgtaatcttagcactttgggaggccgaggtgggtggatcaggaggtcaggagatcgagaccatcctggttaacacggtgaaactctgtctctactaaaaaataaaaaaataaaaaaattagccgggcgtggtggcgggcgcctgtagtcccaggtactcgggaggctgaggcaggagaatggcatgaacctgggaggcagagcttgccatgagctgagatggtgccactgcacttcagcctgggcgacagagcgagactccgtctcaaaaaaaaaaaaagaacacactgtataaactcctcatgatttaattagcatcttactaccttcttgttacctgtgagggaaaataacctcagactccctgctgttcaatcctggttcagctgagagaaataatacttaggaaagataagatttaagtcctcagttttgtccattcctagaaatacattcctagattaagccagaacagctgaagactattttgtattcccctgctcgaattaattttatcagtctattctgagacacagactttggcatcctccccagcctccctgttgtcctgctcaccttgcctggatgtgccatgcatgcttgaccctctgtgctttcactaatactctttcttctacatagaattccattagcctatatatctgcttgttaaaattgtatttaccyttcaagccttttctgaaatgttaccacctccatgaaccctcccttattcctcagttggaattcatnatgtctnttctcttattaccatggtgctttgtttatatctgttattatacttcacaaaatttgtctgatgccatttttttatttacacactcaatgtttctcaatagattgtgaactgctgaggacagagtttgtattttatttatcctcctcacaccttttacatatttgacatttaataaatgttggttttatatgtatgttgctgtcnaaatctgtaatactttatctttaaccatgaaatgattctgtaaccattattgccgtcagtgtcaagtgctttgttcactactctttctctgtctcttactagatctgaataatgtggctgctacagcccggrtcctagttattggagctactaatcgaccagactcgttagaccctgctttgagacgtgcgggaaggttcgaccgagaaatatgcctaggtatcccagatgaagcatccagggaaaggtatattcttatagaatgaagtttgtatgccactaagtcatcttaactgaatggtttgaaagtaagaggtgagaaataccaagtagccttttctttctctctctttctttttgtaccaattaaattgatttggaaaaggagaagcccacattaagaaaatcatttatgcctgggtgcagtggctcatgcctgtaatcccaacactttgggaggccgaggcaggaggatcacttgataccaggattttgagcctgggcaacatagtgtgaccctgtctctacaaaaaataaaatcagctgtgcacacacctgtagtcctagttactcaggaggctgaagcacaggaggattgcttgagcccaggagttcaaggctgcagtaagttatgattgtgtcactgtgctccaacctgggtgacagagggaggccccacctctgtaaaaaaagaggaagaaaacaatttactcatcagtaggataattgtttcaggttgttttttcagaagtagtaatggacttatgtatccatactcatttgtctggtcttattaacaatggcttgcattcttcagttggctgaccaggttagtggcaatgtctggagctatggcatacagcagccatctggtccacttataggttaaatctgagtaccatactttaacctattgcactaacctgtctgagaccacaggtcctgttaccagtaatgaaatggcagccagacagttgaaagctgtttgctgcagtaccagcctttcctggtaattgagcaaatgagtaatgtccatagagcaaataaatatccaccaataaccagaaatataacttcataagcgagactatctcaggaagcactgttgaggtggtagagtggaaatctagttaagaaatgttctgggccaggcacggtggctcacgcctgtaatccctgcactttgggaggccgaggcgggcggatcacgaggtcaggagattgagaccatcctggctaacatggtgaaaccccgttactactaaaaatacaaaaaattagccaggcatggtggcaggctcctgtagtcccagctacttgagaggctgaggcaggagaatggcgtgaacccgggaggcggagcttgcagtgagccgagatggcgccactgcactccagcctgggcgacagagcaagactctgtctcaaaaaaaaaaaaaaaaattgttctgaaatattaggtcgggtatggtggctcacacctgtaatcctagcactttgggaggccgaggcgggtgcatcacttgaggttaggagttcaagaccagcctagccaacatggtgaaaccccatctctactaaaaatacacaaaaaaattagccgggcgtgatggtgcatgcctgtaatcccagctacttaggaaactgaggtaggggaatcgcttgaacctgggaagtggaggttgtagtgagccgatgtcatgccactgtactccatccagcctgggtgacacagcaaaaccctgtctcaaaaaaaaaaaggtatttaatgaggaaggggtacactgaagatcctggtgaggtccaggaacagtgtgggagtaattgcacatataagctcagacatgtgagactgggcagagtgccgcatgtgagattgtgatctcagataggggctagatccaggtgatgacgaggtccagggtatgagtaagtgtaagtaaggaggagaaaggccagacctaggcgggactgggttgcagaggcaatgaatagatgcccaaactttgagccagtgaaggaaaattattccacctctgcctcctgttatccttggtccttgtccagtgtttttaacatttccaagctttagtttatttacctataatgcagtaataataatagtaataactttatctgtaaagtgatcataatactacaaaggcttcctgtgagtattgaattaacataacctagcacaatatctgacatagagaattttttaaataaggtagctattgatagctgtctcttttattattactattttttatatagagaaagggtctcactatgttgcccaggctcatcttgaactcctgccctcaagtgatcctccggatatcatcctgtacttcaaaagcatcaaattatggaaaagtttcagcatacataaaaggaaacccgtataaattgttccagtttctattggtgtaaaacagaccacaccaaaatttagtgtcttacagcaatactcattttattgtgtctcacagtttctgtggatcaagaatttagaaaggcctcagctagatggttctgccttgcggtctcacgtggctgcagtagctggagctagaacagtggtagctttcccttcttttggagtttctacagtatgatgaccaaaaatacccactttttttagggatagagtacaactatgaaaagggcgatattattttctgttagccattttcacaacatccaaaatgttcttagtacggatagtccccaactgacaatgctttggcttatagtttttcaactttacaaagggtttatcatgatgtttttgacttaagatgggtttatcaggaatgtaaactcatggtaagtcgaagagtgttttgtattcttgtgcatagtagcaaattggatctgtatcttttggaaatagttctttagtggaaagttttcttgattcccattattcagagtatcccagtgaaattttaaaaaatttgtcagtaatgtttatctgcttctattctgctcacttatatgatcccaaatgatttttctataatttattctttattagcttgacatttgaaaatattagtcttctttacaaagttattaattttaaaatatatttccttgtccaagttagtttataatatcaaaatatgtaaataagaattaacattcattggcgcatgcctataatcccagctacttgggaggctgaggcaggagaatcgcttgaacctgggaggcggaggttgcggtgagccgagatcgtgccattgcactccagccagggcaacaagagcaaaactccgtctcagaaaaaaaaagaattaacattcattgggcactaactgtagatcagccattgttttatgtgctttgcatgtattcatttgtagcaacagccctctgaataagtgctactataatatagattgaataaatgaacaaactgaagcacaaagattaagtaactggcccagataacaaaggttaacagagctgggattcagactcttgcagtttggcttcagacctttcatcctgaatatcttttttttaaattattcgagatggagtcttgctctgtcgtccgggctggagtgcagtgacacaatcttggctcactgcaacctctgcctcccggttcaagcaattctccttcctcaggctcccgtgtagctaggattacaggtacccgcccccatgcccagctaatttttttttttttttttttgagacagagtctcgctctgttgcccaggctggagtgcaatggcctgatctcagctcactgcaagctccgcctcccaggttcatgccattctccttcctcagcctcccgagtagctgggactacaggtgcccgccaccacgcccagctaattttttgtatctttagtagagacggggtttcaccgtgttagccaggatggtcttgatctcctgacctcgtgatctgcctgcctcggcctcccaaagtgctgggattacaaggtgtgagccactgtgcccggccatgcccagctaatttttgtatgtttagtagagacgggattttgccatgttggccaggctaatctcaaactcttgacctcaggtgatttgcctgcctcagcctcccagagtgctgggattgcaggtgtgagccaccgcacctgccctcatcttgaatatctttactgcttttaagtttttattcagtaggtcttatcagaaattgttcaagatattcctttaataacaattatctagaagtccagatgtttatagataccatgttgccagttaggttgaacaaaattttccacacatgtagtacaggggatgaacaataggtaaagataaagttggagttgtaactgtcctaatatgaaatgggaagtatatggcaagataattttcaatgatgaagataattaatggtttgtgtgtatgtgggggcttttatttctggtagatatccatttaatctactctaaaagtacccccataagttatttatcttatttcccctgtaatgttgtaaattcttaaaggcaaaatattttttaaaaattctatgtattcgtcacagcacttagcatgtttcctaacaaagcagatatttaccataatcctttctggaataagatggaacatgtaataatgacagcgtttgttgagtgactgaactatttgatcttatatagtatccattttgatacctttggcagaygtgaaggacttcaaataaatatagttggtgacttgtttttactattagatcaggaatcagaaattttttcccctgtcttttctacagaatacttcaaacattgtgcagaaaactgaggcttcctcaagcttttgatttctgtcacttagcacacctaactccaggctttgttggtgctgatctcatggcactgtgccgagaggcagcaatgtgtgcagtcaatagagtcttaatgaagctacaggaacagcagaagaaaaatcctgaaatggaagatttgccatctaaaggagtccaggaggaaaggctgggaactgagcccacttctgaaacacaggtgctttctctaaaggcaccttaaattgtccttttaatgttctttgtgttatcttacattgaagcaagggtcaatacaattgaggttcattactttctgttttattggcatttaatctatagaatacttatcatttatacccacgatgtttatcatttcaaaaatatgagttgttttatgtttagtttattttaataaattcattttacaataatgattatgaaattctggaatggggttggcagactgtggcctacccacccaccacgtgtttttgtaaattaaagttatattggaacacagccatgttcatttgtatacatgttgtctgtttctgctttcgttcttcatggcagaattcacacaggagtctgcagcagagaccgtggcccacaaagcctacggtgtttacagtctaaacctttacagaaaaaggttgtcaacccctatttcagcattggcatttaattatatctcctggttaacttttggttaggtagattacagtggtctgttgacacaactatatccatgtcggtagctgcaaacagctctggaggacagtcatgtgaataataggggacagttatcagtccaagatcggtattaaattttttagttttatgagtcatgaaaattcaatatatatatcatttcatatagcattttatagcttgcacagatggcttctgtatgttatataatttgatccctgtaaccttatataaatgtcattttccccattttataatcaaaggcactaagcttaagtggttrtgatttcctcaagcccatacagcctctactttatagagcaggggcttcaatccagatcttttgttctcagataatttgtttttttcttagacatttgaaactgcaattaattctgtaaaaaataacaaactcattccttttataatattgcatataaattaatattttataaattgaattaattggttacctgttttttagacttatcctttcatcttctccacaaagcaagaaatctgccttttaagtttaagatttgatagtaataggaaaattgccttccctctacttagttgataaaccatcaaggaaccatattaatgaattatactacctccagcataagtgttttaatttcatcaggattcaactgtttcttgaatatttataaatgaaacatgggaaatattatggttgctgaaatgaatatttgccaacgcttatatttgctatacctagccctagtatatagaagtcattcttatatgtttaattataattataattggtatatctttacttgaccagagcatatgatccttaagaataaaatgaacttgtctcatgtcagagagaaaattattaaaatacatagacgttcaggatagcttacggaaatattacagtaataatttttayaagtagaaaatgtaacttttcaatagctgttgtggtgtttctttatttttttcccctctattgttcccttcaaggatgaattacaaaggctgctggggttgctaagagaccaagatcccctctcagaggagcagatgcaaggactgtgcattgaactgaatgatttcattgttgctctatcctcagtccaaccctctgccaaaagggaaggctttgtcactgtccctaatgtgacatgggcagatattggtgccctggaagacattagagaggagctcaccatggcaatattggtaggtatatcagctgccaaatattattggcatgtcatggattaaagaccagagataaagctccatgcatgtgtactaggttctgtggctaaactgacttgactataatcactgtgtctaacttgacttgaatgtagcacttctttcaagcccccaacaatggtttttcttttgtttgagatccgatttgtttatttttttaaattgatgtatcatagttgtaaatatttttgggatacatgtgatattttgatacatatattaaatgtgtattgatgaagtcagggtaattgggatattcatcacctctaatgtttatgttttctttgtgttgggaacattatactttttttcttctagctgttttgaaatatacttttttcttctagctgttttgaaatataatttccctaccgtgctatcaaataccagaacttattactcctatctaactattttttttacccgttaaccaacttctcttcattatactcatctccaccttcccttcccagcctctggtaaccatcaatttgctctctgtctccatgagatccactttattagctcccactatgagtgagaatgtgcaatatttgcctttctgtgcctagtttatttcactaacataatgacctctagttccatccatgttgctgcaaatgacaggatttcattcatttttgtggctgaataatattccattgagacctattttatgctgatccttttggttgtgcttcatttctgtagcagtgagtttaaaccacaaaaaattataggtttcagttaagaccaaattgtttgacaaagactttctgaacttgatcttatggatcaaggcaattttaatgcacataaaactttggattaatttttatttactttacttttctactcatcattccatggttcattaatggaaatatgatcgatttagaggtatgtactactgaaagagaaaatacactgggattatagtcaacagatatctctggcttttaactatgcaaaagttactgctgcatctgatttcttagaggagaccattgtctaaacattttataacctagaaatttaaatggttttctaaaacatatttgttgaaatattatatcattatgtctaaaatgttcttagacattatgttcaagtataaattcctcaagtgcagggacttttctctttatcaccacagagcatgaacaggtaaaccaggtactgttcgtatcttcaggcctcacagtcatgttgaaaataagcctgagaagctgggcgcagtggctcatgcctgtaatcccagcactttgggaggctgaggcaggtggatcacctgaggtcaggagttcaagaccagcctggccaacatggtgaaaccccgactctactaaaaatacaaaaattagccagacgtggtggcatgtgcctgtagtcccagctactcacgaggctaaggtgggaggattgcttgaacccaggaggcagaagttgcagtgagccaagatagcaccactgcactctagctgggtgacagagggagactcaaaaaaaaaaaaaaaccataaaatatgtatctggaaataatttgaacctgcagtataaaatggacatgtaatggatcgccgttkgtatcattatttccaggcaccagtacgcaacccagaccagttcaaagctcttggattggtgactccagctggggtcctccttgctggtcctcctggctgtgggaagactctgctggcgaaggtatcatataagttcaattgcatgtaatttatttcttagtatcagataggataatatgaacttaactttaaatattayagtgaggtaagtcttatgcataatttttatcagaagtttattttagcaaaactgacaactttcttcattaaagtttcctacttttttaaattacaaaggcacatgattgaaaaatgtttatatcaaccataatcctatcaattttaacatgcaattattatattttctgtgtattacattttagctttttagtgagtattattccatagttttagtttttacttgacttagtttcctgctttggtattgttattatttataacttaagtattttcctctatatttcttgtaattattttctaaaattgttttttcataatagaaaataaaaataagcaaaaaggaaaagcattgtgtgtaattctctcactgccacctactactattatttcatttcattgtcaatccttcagatatttttctatgcatacatatcaaagtaatatctaacttttaagtttttacatgcatgtttacaaatataagctttttttattttattttattatttttgagacggagtctcattctgtcgcccaggctggagtacagtggcatgatcttggctcactgcaacttccgcctcccgagttcaatcaattctcttgcctcagcctcccgagtagctggggttacaggcatacgccaccacrcccggctaatttttgtatttttagtagagatggggtttcaccatgttggttaggctggtctcgaactcctgacctcatgatccgcccatctcggcctcccaaagtgctgggattacaggcgtgagccaccacccccagccacaaatataagcttttttaaacatgtttttctcacttagctgtatttcctgaacatcttcacgtcagtatatattgatacacatcaatatttttaatgcctgcataatattctaccataaagatagatgttctataatttatggaaatgatcccatattgaaacaacactactttaaatggccttgcacttatatttttgtaccttgactaataattatattagaatgcatttctaaataattttccagtcaaaggaatgtatgtttttaaggcttttgagccatattattaaagtgccttcctaaaggttttcaccagtttttaccttttttatcaatagggtatgagaatcaattttcccacaccttaaactagtgatggccatgaacattgctcttaatagtggacaatttaataggtaaaaatgctgtcttacagtttaatttgcattttaaaaattactagtgtttttttggccaggcatggtagctcatgcctgtaaccccagcactttgggaggccgaggcgggtggatcacttgaggccatgatttcaagaccagcttgggcaacatggtaaaaccctgtctctactaaagtaaattacaaaaattagccagatgtagtggtgcatgcctgtaatcccagctactcgggaggctgaggcacaagaatcacttgacccaaagaggcagaggctgcagtaagccaagatcacaccactgcatgccagcttaggcaacagagtaagactctgtctcaaaaaaaaaaactagttttttttatttaagtatgtttattggctatatttctttgtgaattgtctattcatatcctttcctatttttctaatggcatacatgtgattttctttcttatttatatcacttcatatattaagatttgttatttataaatgttgattagtttatcttgactgtaaccatgtttgacaccttgagcttttttggtttgatttttatgtgggcaaatttctgtctttttgtgcttttttccccattggaattatgcttattagaactgtcttccctatgtgtaaagtatgttatccatcatttttagtgtctgtataatattacatccataactaacccttatcaacttttaaaaatattttgaattgtaagaaattgaaataataacatttttaataagtacaacagcaaccaaattatagctcctcagtaaatatcaaatatccatagtgctgtgtgtaaaacttacttttatttatactactaattttccttgcttaatgctttcagtactcttaaaaggcattgctttcagagagctgggtatggaggtagaagagaacaacacagtcattgatctacaattttttcacaatagttttggaaaaatatagccagaaagaaggttctgcatgctggtgtgtgaattctccaggtcaatgcacttccctttcatgtgtgtcctatagtgtttattatttaattagttacatctgcctttgagtagtcctgttcacagcagagaggaggtagcttggataacttgaaaagcatatatagtactaaaacatcatagatctacatttctcctcttcttctccccactactgaactgccaacaattgaggaccactctgtttagtcagatttctttctttctttctttctttttttgagatggagtcttgctgtcacccaggctggagtgcagtggcacaaccttggctcactgcaagctccgcctcctgggttcacgccattctcctgcctcagcctcctgagtagctgggactacaggtgcctgccaccatgcccagctaattttttgtatttttagtagagacggggttttgccgcattagccaggatggtctcgatctcctgacctcgtgatccacccgtgtcagcctcccaaagtgctgggattacaggcatgagccaccgtgcccggccttagtcagatttcttacatctgacctttgggagcagggactcttacctaggactccatgaatggacttcacagcttcactgaatctatgagcccaggcaatgtattgtgtatatgtattgtttctggggaagagtgttcacaacacctttcatcaggttctccaaggggtgcaagactatgtgcccaagaatccagaaatagaaaatgtccttgaatggcagaggcaaagtgtggcctaggataaactcatggaacaaattataggtcagaacctagaaacctagagatacatataaaattaggtatttggctgatcttgattgttttgtttactcaggataacaaaataatacaatttttcttggcacctgcacatactaagtatgtaactagcataaagtcagggcatgcagttactggagttggagaggtttggaagaataagaattgggagtccagttttggaagtggtagatttgaaatgcttgtgcaatccaagtggtgttgctgaggagtaagtggaacatagatggggagctcagataccaggttctaagaataggaaagaactctcttccatgatcattttgaagttctgattgattttattcaggtttcacctctgcattcagattgtaattcttagactcttctacacatacaactatgagtttctcaacactgactcttcgtaaagactgataactgatgttaaattttcatttgtaaatcaatgaatgctttcatcccatgaggtatttcttgagtacagagactagcatttcactggaattccaaactagggctataaatgtatttatatttacataagcatgtttatgtaaacaaatgttcacataaatattttgtgtcatttccatttgatttatagccttagtaattcttagaaagttgtaggtttcagcctggrcaatgtggcaaaaccctgcctctaccaaaaaaatacaaaaattagctgagcgtggtggcatactcctgtaatcccagctcctcggaaggctgaggtgagaggattgcctgaacctgggaagtcaagactgcagtgagtggtgatctcatcactgcactgcagcctgggcgacagtaagattctgtctcaaaaaaaaaaaaaaattaaagtgaaatttaaaaaaaaaagttgtacgttaacacattaacgtttatttcctttgattttccctttatccattccccttttcccatttgtcttttttcctttttttttttttttgagacagagtctcgctctgtcgcccaggctggagtgctatggcacaatcttggctcactgcaacctctgcctcccgggtgcgagcaattctcctgtctcagcctctcgagtagctgagactataggtacatgccaccatgcccgactaatttttgtgtttttagtagagatggggtttcaccatattggtcaggctggtctcaaactcctgacctcaggtgatccacccgcctcggcctcccaaagtgctaggattacaggcgagtcaccgcacccaccccttttttccttttaataagaaagaggtaactattaatatagaaagggagacacagaattaagaccacaaaaagggctaggcgcagtagctcacgcctgtaatcctagcactttggcaggccgaggcaggctgatcacgaggtcaggagattgagaccatcctggctaacatggtgaaaccccatctccactaaaaatataaaaaattagccgggcgtggtggcgggcgcctgtagtcccagctacttgggaggctgaggcaggagaatggcgtcaacccgggaggcagagtttgcagtgagccgagatcgcgccactgcacttcatcctgggcgacagagcaagactccatctaaatctcacacacacacacacacacacacacacacacgcacacagagtcctttcattgtcacacatcatcatcattattattgttattattactgtgtattggtcttatttgtgtctttttgtttcctcttgctaggctgttgcaaatgagtccggactaaattttatatctgtcaagggccccgaattactaaacatggtaagttattgagcaagaaccattattttagattagaaaaagtaatggtcatgcaaattacggggtaaaatgttctcagatctttcagcaattgtggtattttggtatttaaaatcagtgctgtaggagtgaggaggctgagctttgctctgctctgccactttgggtgtataaatgctttctcaattaagtctgttaacctctgagcctgaattttcccacagctagaagcagtagagcaaagatttcaatctgagttgtctgactcctgatctactttttgtccagttgtcatgtggctcagatgagttccatattaataaataaaaatacttctggagatagaagtcactcaagtgctgtatcttccttctgcatttaagaaacttattatccaaatttaagacactttgaatttattttttgtccctctctgtgaaaagtaaaaatgccattctatgatatattccaacaaagaagaaatgagggtaacatttgttttaaaaggtttttaaaatttatctctacctcaatttttaaatctttcctattgtgtattactttctccctaaaataagggagttatacttaagtatttcctatgggctttttacatacctcgtaacttttcttgtacttggttttgattttccagcagaggtggtattagatgtgaaccttgaagcagagggcattggtgggaactgggattggaaaagaaggttatagccagacattgaagggcctttataccaagctaaagtttggatgttaacttcagaatatcagagagctaatagaggctttaagtcaagagtgtaacatatttttaaagattgtaattaataaaaattttattataaaatatttccacatataaggaattccaaagagtaatataatatacccctatgtatctatcacccagcaaaaaaaaaaaaaacaaaaaaaaacagcagtacacttaaagcttcttgcaaaccctccctcatgatgttccctgttctctttcccatggaacttaccacaaggctgaatttggtgcttattagttccatgcacttctttctatatttactatgtgtatatttatccctaaacaatatatagtattattttatatgtttcagaagtataaggccaggcacagtggccgacacctgtaatccccagcactttgggaggctgaggcaagaggatcacttgaggccaggcatttaagacagaccagcataccaagaccctgtctctaccaaaaaaatttttaatgtaatttttttcaagtatgaggtttatgagataattggaaatgttagtgcttactgaatattttatattaaggaaatactaatttttaagtgtgatatgacattttaaaatcatattttagagatactgaaatatttataaataaaataggacatctaggattttcttcaataaaacaaggaaagtggccaggagtatagatgaagcaagactggtcattaatcgagttgataataattgaaggtcagtgatgggtacatttgaagtttataactgttatatctctttagttataagtttggaactctccttataaactctccatggtataaagcaaaacaaacaaaaaacccctttaaatagtgtgtattattttgcaacttggtttggttgagttttttggtttttgttttgttttgttttttgagagagagacagagtctctggaagtagaggttttgctgtattgtccaggctggtctcaaactcctggcctcaggtgatcctcctatctcagcctcccaaaatgctaggattacatgcgtgagtgactacacctattcttggttgttatttttgttcaatatttatttataatacttatctctgttgatgtatttttagtttattaactttttgtgtggcatttcattgaatgaatgtaaccatactttaaaaatcagttttttttctgatgaatttttaggttgaatattatatatgtatatctttgcatatatttgtgagatttttttccccttagggtatatacccagaaggagaattgctgaatcttagagtatgtgcactttcaaaaatattaggtattggctgggcacagtggctcacacctataatcccagcactttgagaggtcaaggcaggaggattgcttgaggccagtttgagaccagcatgggcaacatagtgagaccctgtctctacaaaaaaaccccataaaattagccagatgcacacctgtagtcccatctccttgggaggctgaggtgggaggatcacgtgagcctgagaggtcgaggctgcagtgagctatgatcacgccactgctctccagcctaggcaacagagcaacatcctgtctcaaaaaaaaaaaattggatattgctaactatttttataaagtgattgtatcagattgtcccacattctcaacagcagtgttggtgtctgatattttcatttttgccagtctggtaaatatgacattttgcctcattgtggtctgatttgtttttaacgggtgggtagggggaagaggtctatggaagagtgcagaatgtctctgaaagattagatgatctgggctgggtgcggtggctcacgcctataatccctgcactttgggaggccaaggtgggcagatcacttgaggtcaagaatttaagaccagtgtggccaatgtggtgaaaccccattgtaaaaatacaaaaaaattagccaggcatggtggtgggtgtctgtaatcccagctactcaggaagctgaggcaggagaattgtttgaactcaggaggtggaggttaacggtgagcagagatcacgccactgcactccagcctgggcgacacagtgagactccgcctcaaaaaaaaaaaaaaaaaaaaaaagattagatgatctaatgaggaagatgggcatcttgggattggaaaatgagttcactctaggacattttagattaaacagccatctggagatgtccagcaggcagtaggaaatgtgaatctgaagctctgaagagatttgaaagtcactatcatccaagtggcatctaaaaccatgggaatgggttcagtctggtaggacaagtttgttaagtaaaagaacagttacattaagggcctctgacagaaccctgaaagattcgaacaattaagggataaagaagcaagatctggtaaaggagaccgaaagtgcttggtcataagatggagaacaccccggaccttctaagcctgaaaaccaagggaagatgagtttttcaaccttgtcagtgtgactaaacagtataaaagatagtgagagtgggacttgggatttggtaattagaaggtcattggtggctttagggaaaatatgtttaataatgatgtttgcaaaagccagaataaaatggttgaaaatttgatggccaataaagattttgagataataaatgtaggatctttacttgaaatgttgcatatgtttcaaataaaggataagatgggcttttcatttatttacttatttttaatcactgttgccttgttaagattaagtaggttttaatatgtcctcgttgaaactttaggtttacctttccctaaattaaatttccttttacctagctaccttggtttaccatttccaaagtcactttgccaacggtattgattgttctcttctattcctatctgaaactttatgtctcccagccccctgatatgccttcttttacaatagtactgaatattttgcttcagcattgcaagtatagtttttgctgaattcgattttccaggaaagtctactatatttgtacactgtttattatatttgcacactgtgtgctatatttgtacactgtgcaggatgttatgacagaaaaatctgaataggactcctgctttccaaggactttgtaatataatatagtgagggtagaagagctcaaatgttacaataatgataaaatctgaatatctgaataggacccctgctttccaagggctttgtaatataatatagtgaaggtagaagagctcaaatgttataataatacaaagtactttaagagcaaagaaatactttgggtttggtttcggtcaaatgatagtaaaacagttttatgtgtcataaaactagttttatgtgtcataaaactagttttatgtgtcataaaactagttttatgtgtcataaaactagttttatgtgtcaaagtccagaaagtatcaggatgaggataagccatatacaattgctgatatttaaccatttttgacctgtaatagccaactgcatatagttcaacttaatcaaattaactattatgggaagaatgattaatgaggatcttttagaatgcaagaagaaatgtttggaggtaggttagaaagcagttcaagtaagggaagcagaatgagcaaaagttcaaagaaaagtaccaaaaggatgtgagggaaagaaagttctagtcaaatgaaaaaatagcactttaatctctgtcgtctgtggtactctttgccttgattatttagtatggccatatagtcattaaatagcataggtgatatgaaatagttggcactgtaggccgggggcagtggctcatgcctgtaatcccagtattttgggaggctgagtcaggtggatatttgagttcaggagttcgagaccagcctggccaacatggtgaaaccccatctctactaaaaatacaaaaattagccaggtggtagtggtggtatgcctgcaatcctagctactcaggaggctgaggcaggagaatcacttgagcctgggggcgtggaggttgcagtgagccgagatggctccactgcactcctgtctggttgacagagagaccctgtcttaaaacaaaaataataataataattggcactgtaaagatgtttttggattccatcttatttggcagtttcattaagaaaaaaactgctctttcttaatcatctggtttgacattttacaagaaaaatttcttatgcctaagctaaaagtgaaataatccttacatgtagcttttcatattacttagtcctaatgttatagttgcttgtgaattgctatatttcttgacttatcttaatgttttatattttgatttagatttcaacatagagtaagccattatgaaacctgttaagtgcctagttggctcactttgcctcctctgatgctgtatgacaaaatagttattcctttatttagtaagacgacttgtgtaaaaataacaataaaacagtaatttgacttgtgtgtatgtaaaatactgttgaattaatgaaaattactgctggatattttatatgcacgaggcttacaagattagttctaaagtgcaattgaattttggtgattttttttgagctagagaagaacttacgtttcacttaagtcttcattttataaataaggaaatttatagtaggcttaaatagtagctaattttattaagttgaactatatgcagttggctattacaggtcaaaaatggttaaatatcagcaattgtatatggttcattctgatactttctggactttgacacataaaactagtttatgtcacataaaactgtttagtatcatttgacccaaaccacaaagttgaactgttggtattttatttcctttctgtgtatgtttagtatgttggtgagagtgaacgtgctgtgcgacaagtttttcaacgagccaagaactcagcaccctgtgtgatattctttgatgaagtggatgctttatgtcctcgaagatcagaccgagaggtaagtatcatggactagtggttttcagattcttttagcacaataaaccttttctatgttccaagccaggtatttcttatgaagtcatcccttgggagcattgagactcttaatgaagacacttagtaatttgaaatcaaatcctagagatagcagttgtattctgtatccgcctctgcatccagtttttttcctgtacattattttggttgcacaatctttaggtcatcctaattcacacaaatgagtaggtaagtatggaaatgatattgttttaaatagcttgccttataatcttgtaatcctacaacattcttgagctaaatgggttcttgagacaggaaaacatacagtttaagatatcatgcactcaaaatagggtcaggttattaacttttaagacccaaaaccttttctcttaaagtgaggacatgaaaatgatgaagataaaaaaagacccaacacccattttatatctggagaagatataaaattgatctgcactgaataccacttgtgtcagccacactgagtcacagtccttagagatttcagtacggagtaccagaaacagttgttattaggagtgctattgtataacaatttgaagcttagtgaagcataacataaacaataaatatataacctttttgaagcagatagcaactgctatttttatttatttttatttttatttttttcgagacggagttttgctcttgtctcccaggctggagtgcaatggtgcatctcggctcactgcaacttccgcctcctgggttcaagcgattctcctccctcagcctcctgagtagctgggattacaggcacccgccaccatgcctggctaatttttgtatttttagtagagacagggtttcctcatgttggtcaggctggtcttgaactcctgacctcaggtgatgtatccgcctcagcctcccaaaaagtgctgggattacatgggtgagccaccatgcctggccacaagtacatttcttgtaagatgactgaaggaatggttacatttctttttgttgttgttgttgaaacagagtctsactctttctcccaggctggagtgcagtggtgtgatctcggctcactgcaacctctgccacccgggttcaagcgattctcctgcctcagcctcccgagcagctgggattacaggcgcccgccaccgcacctggctaatttttgtagtttttagtagagacagagttttaccatcatttctgaaacctaggaaatcttttgtgatttattttcaatatgggtgtgtgtgtgtgtgtgtgtgtgtgtgtgtgtgtgttgttaggtcataaaacattattacatgcctcattttgctaaaaatctccgaaaacattcaaaagtcacacacaaaaaaggatgactaatataaataaataaataaataaatgtgactcacattttagcggttttgtttcttcatcctagtcattgataccatcatagaagattcttactacaggcttatctttgatagtgatgtcagtgactgaggcagagatccttcccaggttccccagtcatattccaaagtctactgtgggctatggagcaaaacacagcactttgttatctccagctggttagggcacagcatgctctggattttattcctttcctttttattctctctcttttgccatgaataaacccttcatttgtccatagccccttcaattggtttgaagctctctactgtcagctggtaaatctaaatttggagaggttcattgtcaactgttgccctcaaagaagtctgtagccgtatgaagtacatgtctaacttctggtttatctctctcttttttttaaggaataaagaatggctgctccataggcagagcagccttatctgtttcttggatgtctactgccgtacatttctttttttttttttcttttgagagagagtcttgctctgtcacccaggctggagtgcaatggcrctatctcagctcactgcaacctctgcctcccaggttcaagcgattttcctgactcagcctcccgagtagctgagattacaggcgcctgctaccatgcccagctaatatttgtattttcagtagagatggggtttcaccatgatggccgggctggtctcgaactcttggtctcaagtgatccaccatcctcggcctcccaaagtactgggattagaggcgtgagccaccacgcccagcctactgccatacatttctatactctgatatatatggttttcttttcttgtgtttttgttgtgtttttttttgtttgtttgttttttttgtttttttttgagacggagtctcgctctgtcgcccaggctggagtgcagtggcgggatctcggctcactgcaagctccgcctcccgggttcacgccattctcctgcctcagcctcccaagtagctgggactacaggcgcccgccactacgcccggctaattttttgtatttttagtagagacggggtttcaccgttttagccgggatggtctcgatctcctgacctcgcgatccgcccgcctcggcctcccaaagtgctgggattacaggcatgagccaccgcgcacggcctgttgtgttttgttttttgttttgtttgtttgttttgagacagagtcttgctctgtcacccaagctggagtgcagtggtgtaatctcagctcactgcagcctctgcctcccaggttcaagcgattttcctgactcagcctcccaagtagctgggactacagatgtgtgccaccacacctggctaattttgtatttttagtagagacggggttttaccactttggccaggctggtcttgaactcctgacctcaggtgatccactcgccttggcctcccaaagtgctggcattacagatgtgagccactacgcccagctatagtttgcttttctaacattttcacctaaagcagattctaaaaacattttatttttattttttgtttctttttatttgatttttttttttttaaaacagagtctcactctcactcaagctggagtgcagtggcgtgatctcagctcttcgcaacttctgcctcctgggttcaagcgattcttgtgcctcagcctcctgagtagctgggactacaggtgtgtgccaccatgcccagctgattttttgtatttttttttttttagtagagacagggtttcaccatgttggccaggctggtctcgaacttctaacctcaggtgatccacctgcctcagccttccaaagtgctaggattacaggcatgagccaccatgcctggcctctaaaaacattttaaatttgaatgcattctgttttttttgagacagagtctcgttctgttgcccaggctggagtgcagtggcgcaatctcggctcactgcaacctctgcctcctgggttcatgcgattctcctgcctcagcctcccgagtagctgggattacaggcgcacaccaccacgcctggctaattttttgtgtatttttagtagagatggggtttcactatgttggccagactggtctcgaactcctgacctcgtgatctgcccgcctcggcctcctaaagtgttgagattacaggcgtgagccaccgcgcctggcaaatgtattcttttttaattgcactagttatacatgaatacacatttgtgaaaaattcaaataaaacacaagtataaagagagtaaatttctttccattctcctccgtattactctttttggaggttattacgagactgctaatagttgtcatttagtatgcatcattctagaattttttccagaaacataaaaaaatttatattttatgcttctgttttgttgttgttgctgttgtttgagacagggtcttaccctgtctcccaggctggagtgcagtggtgtgattgtagctcactgcctgctgccttgagctcctgggctcaagaaatgatcccacctcagctgcctgagtagctagtagtaygggtgtgcaccaccacacccagctaagtttttgtttttagaggtgggatcttgctgtgttgcccaggcttgtattgaacttctggcctcaagcgatcctcctgcctcagcctcccaaagtgctgggattacatcatgcctggacctaggcttctattttttatataaatgtggtcattctgtcttgatgactttctcatgtacgtaataacttaaaaatagatattgtataatagtctggatacagcagaatttacataataattctcctgttttggacatttagattgtttccagttgtaaatagaactctgctgaacttgtttcacgtatttttgtgcacctgtgatgggactatatgagatagatttttggaagtgaaaatcagggttgaagattgatatatattagattttgaaaaataatgctgtatcatccttcacaaaaactgtcagttacatgtgcccaccaacagtgtgtgaaaataaccatttcctatcaacaatggattatacctgtctttttattttttggcagttttattggcaaatcatattacattttagtatacatgtccctgattaccatgaggttgactatctccagtgatttgaaattatttgatcttatctttcaacccttttgctattgctgtctttttctttttttacattaattggtactctatgatggaaagtagtcttttatttaattatgtgttgacactatttttcccagtcttatgacttatatttaattttattatatagaatattataggttttgtttgtttgtttgtttgttttctgttttgagagtctcactccgtcgcccaggctggaatgcaatgatgcaatcttggcttactgcagcctccgcctcccgggttcaagcaattcttctgcctcagcttcccgtgcagctgggattacaggttcccaccaccatgcccagctaattttttgtatttttagtagagatggggttttgccatgttggccaggctggtcttgcactcctgacctcaggtgattcacatgtctcggcctcccaaagtgctgggattacaggtgtgagccacaatgcccggccagaatattatggctttaatgcagcaaaatctatcagtcattcttgtattgactctgagtttgtcttgcttatgtagaaaaaatgttttttacccattacttccttatatttttgagtatggattatgattctgttagtgttatgttaccaaggagtgataataaggagcaccaatttttttttttctagagaaatcagtggggtaagctgggcgcggtagttcatacctgtaatcccagcagtttgggcagccgaggtgggcagattgcttgagtccaggagttcaagaccagcaagggcaacatggtgaaatcccggctctacaaaaaaaaaaaaaagaaagaaaaagagagaaaaattagccaggtgtggtggtgcatacctgtagtcccagccacttgggagactgaggtaggaggattgcttgagcctagaaggcagaggttgcagtaagctgagatctcaccactgtacttccagcctgggtgacagaacaagacccctgtctcaaaaaaaaaaagaaaaaagaaagaaagaaatgaggtaagcccattaccacctctgtacataaaatttatggtgaagaaaagcaattaatgaccaaaaacacagcaccacttttctcatttccttcatttaaaacttttttgttgtttctgtatctaagtgatttatccccctccctgaatttataccaactccctgaatgtttcctttcacttagatattgctgaggtagctgtactttgtattatttgcttcaaggaaaagagaaaatacctcagtgtcccagatactcttgtatgtgttgcactaaaaagatctggaacacctggctggtctaatgtctaatggtggtgggttatcagaacttattaacattagtgtcgtccaggtgcagtggcacaagcctgtaatcccagcactttgggaggccaaggcaggaggattggttgagctcaggggttcgagactagcctgggcaatatagcaacaggatctctagaaaaaatatgaaaattagccaggcgtggtgacacacaccagtaatcccagctacttgggaggctgaggtcggaggactgcttgagcccaggaggggaaggctgcagtgagctgatatcacaccagtacactctagcctcggctacagagtaaaaccctgtctcaaaaaaaaaaaaaaaaaaaagttagtctcaccaaagttggtatacaacctcccactgttaaatttgactggctttaaaaataaaataaaatgagatctagaatacctgatatactgggaaatttggggttcaaaagcttagtctagggccgggcgcagtggctcactcctgtaatcccagcactttgggaggccgaggtgggcagatcacctgaagtcaggagtttsaagaccagcctgaccaacgtggtgaaaccgcatctctactgaaattacaaaattagccaggcatcgtggcatacgcctgtaatcccagctacttgggaggcagaggcaggagaattgcttgaacctgggagatggaggttgcagtgagccaagatcacaccattgtactccattctgggcaacaagagtgaaacttcatctcaaaaaacaaaacaaacaaacaaacaaaaaagcttagtcttggtggggtgcagcggctcacacctataatcccagcactttgggaggctgaggcaagaggattgcttgaggccaggaggtcacgaccagcctggacagcatagcaagaccccatctctaccaaagaaacgaaagctagctgtagatttgccccaagggaagtgtattgtgacggttagatctttgagtaactcgaaaacatcagaccttgggatccattcagcctgagattgagtctcatttcttcctttatctagtgatgagaacttggacaaataatccctctaagcctcactttcctcatttagactggataataataggattgctggggaggtccactgatgagaacacattttgcacagtgtctgcatatagtgacgcctcagaaaattatcattgttatctcctttgcatggggaaatgtattatttttatgtggaagaaaatgggtatttttcctttgtattgagagctgatggaaccagatttatgtctttttagacaggggcaagtgtccgagtggtgaatcagctacttacagagatggatggtctggaagcacgccagcaggtttttattatggcagccactaacaggccaggtaagaaataaaaatattgtaacacagatgaatctaaaaacttacagcatttccgtagaagagattcagataattaaaaataaaagtaaaaactagtagcatttataaacaatataattcacatgcatcctaggaaaggaagattaaatttgggcaatccatttttggttctgtgaaaggaaacttcatagttgaaataaaggcttagaaagcttttgcataagctatagtaaaaagtatagtattactgcttggatcccatgagattgcttttctgtgtcggtgcttagaaagctctttttggctgagaacagttgcagcatacacttttttttttttttttttttgagacagaatctcgctctgtcacccaggctggcatgcagtggcatgaccttggctcactgcaacctctgcctcctgagttcaagtgattctcctgcctcagcctcctgagtagctgggattacaggtgctgccaccatgcccggctattttttgtatttttagtagagatggggtttcgccatgttggccaggctggtcttgaactcctgacctcaggtgatctgcccacctcggcctcccaaagtgctaggattacagacgtgagccactgcacccgaccagcatacacttttgaccacaaaagtattttcagaatttgtgttttgtggtttctctctagcttataggaaacaaaaacgagactcttcactctagtagaagttaaagatagatttttaggattttatgctggagccatgcccctatatctgccctgaataattactgaaaattgttttcaaggttaagcattctttgagggattcagaaaagggctcaagactacagaagtgcagaagatggctcggagttacaactctaatcacatgcttgatctttctggtgatcagtcccctgcccgaagctatctgtggggccactatgcgtcaccacattagctcaacaaagatattcctggcactcaggaaattgcaaggatttttgaagatctatgccaggaaaggtgggcaaagaccagttatattctgtattataccatagtaaccttgggactatattactttatcttgctgaccatcattttggcactttttaaatgaagatgataatacttaattggcaggattgccacaaaagttaaatgatgttggtaatgtatctgccacagtggtgttaaacagcacgtagctatttagtaattgttatcatgttcataagcagtttggtaatagtagtgggaacagtcattaggtcataaaatcacagagtcatcctagaagaaagtccctcagagttgaacagaatcacatcgtccctttcataagcagatacagatcttttctcacatatttcaagaagatgcttgtcttagtctgttttgttttgctgtaacagaatacctgaaactgggtaatttgtgttaaaaagaaaagagattcagttcttctagttcaggaagctgggaaggtcaaggctgagtggcctgcatctgtcaagggccttcttgctgcatcaccccaaggcgaaagggtagaagagcacaagagcatgcatgagagagcaaaaggaaagtggcctggacaggaagaaaccatggtcccatgagtaaaggtggacaaataaagtttaattaattttaccctatctttggacatttatctcaactgcctgagctaaacaactgttttcttcagcctaccaaaaagcattttgtatagcaaaagattagtttcactggaggaagtctggagaagaaagaagcagagagaggggggatcctggggagtaggaaatgagggccctgtttctctcaaaaaagcctcattgaagaaatacattgatccagttttttccagtatatgatcatcctttttaaagtgaggagcataaattagtaaggatgggcttaatatctgttagtggtgagacagaaaatgctaaaattattatctgtttaattgtttgtactatctggttttgatgtatgacttgtcatatgtgcagtatattaataacatcatacagaaacatagttaacaaatgagtagacattaaaaaagaaagaaagtggccaagctgggcatggtggcttatgcctgtaatcctagcactttacgaggttgagacaggaggatcgcttgagcttgggagtttaagaccagcctgggcaacatagtgagaccttgtctctattatttaaaaaatagtgagagtggcgaaacatatccttttatcaagagtccactcctgtaataacttacccactctcttgaaaccagcatcattcatgagggcagagccctcatgacctaatcaccttttaaaggtcccacatctcaacactgttttattggggattaagtttccaacacgtgaaatttggggaatacgttcaaaccacagcatcaatctttcgtttcctgtaataacctattctatcgttaacagcccgcaccatattttaagtttgtttattttattttattatttatttatttattttgagacagagtcttggtctactgcccaggctggagtgcagtggtgtgatctcagctccttgcaacctctgcctcctgggttcaaagatttcttctccctcagcctcccaagtagctgggactacaggcacgtgccactacgcctagctaatttttgtatttttagtagagacagggtttcaccatgctggccagcctggtctcggctcctgacctcagaggatctgccttcctcggcctcccaaagtgctgggattacaggcatgagccactgcgcctggcctgtttattttaaaacctgtgttaagaatggcagaaatggcagatgaatcataatgtggtaccggtgttttgttttttccctatgtgtgtatattgtcttcccctaaaactcttccatccttttttcccctgtaacaaatctgttgcattaacgacctacatttaaaaataaatgttctggccgggcacggtggctcacacctgtaatcccaacactttgggaggccgaggccggcggatcacaaggttagaagatcgagaccatcagctaacatggtgaaaccccgtctctactaaaaattaaaaaagattagccgggcatggtggcacacacctgtagtcccagctacttgcgaggctgaggctgaggcaggagaatcacttgaacccgggaagcggaggttgcagtgagccgagattgcaccactgcactccagcctgagtgacaaagcgagactctgtctcaaaaaataataataataataaacgttctagatcttcttcacttgttttcatgcttatttggcagttctgctccattgtatactatcacgtgacattgttttgattgcttataacttctctgcttagctttaagaattcccttcttgcttgatgttctggttagccgttgctgcataacaaactactgtaaagcttagtgctttaaaatcaccatttgtggctggatgcagtgactcacacctgtaatcccagcactgtgggaagccaaggatcacttgaggtaaagagttcaagaccagcctgctcaacatggtgaagctccatctctactaataatacaaaaattaattgggggtggtggtgggcgcctgcaatcccggctactcaggaggctgaggcaggaaggagaatcacttgaacccaggaggcggaggttgcagtgagcccagatagcaccactgcattccagcctgggcgacagagtgagactccatctcacaaaaaaaaaaaaaaatcaccatttttatttggctcacaatttttaggtcaggaatttgggatgggcttgtctgggtggttcatcttggatccacgtgctatcagctggagtggctggaccagagaatccatttccacagtggcctctttactcacaatgtcttcacaatccttggtctctctcccaacccggctgccaaataattataatctttttggagtttgtttgtttgtttgtttgtttttgagacggaatcttgctctgtcgcccagactggagcgcagtggcatgatctcggctcaccgcaacttctgcctcccaggttcaagtgattctcctgcctcagcctcccgagtagctgggattacaggcatgtgccaccacacccggctaattttgtatttttagtagagatggggtttcaccttgtaatctttctgatgtttttactttatacattgaaaaatgtttaagaagcagtctataaactttctgtattccaaagaagtccttgacacaaaagatactctgagccagaagatctacagtccatggagaatttgtgtgagcttaatgggagaagtaagaagtggtaaaatttgagacacattttgaaagtaaaactaataggattttctggaattagatgtgggataagagaaagaaaataaataagggctattcttattgttagattgttttacctatactgggtaaaakgttttgccacttctgagataggggacacttggagaaaaaggacactttagaaaaagaccaacttttctaaaatgtctgttcaaggagatgaaaataagtttatttcattttctttacaagtccatattatttaaaacaatcaccagtaataacaactaggttcttggagcacctactaagtgccaggccctctgttggatgctttaccattgtaaacctcacaacagccctacgagaaaactacatgtgtgcaaaagttgaaccttggtgagtgatatggtttggctctgtgtccccacccaaatctcatctccagttgtaattttgacatatagagggagggacccagtttcaaatcaaatggcaggaaaagcttataacaaaaactgtagttttctctcccatcccttctaatcccctgcccagaggcaaccacttgagctatttttttccttcatattttcaaatatgctcttatggctatttcttatcaattttaaacactgcccattaacttcattttaaggtagatgaagatttagttatcttatgttcaccctttctccataccctccactcccaccatcactgccacatcatctgtcctcttccccattctcccagtattgtaatatagtttgatcagaactcttggttaagtcactagtgtttacattactatggctgtgtcactatttctctctgctgacccaagcatgacactgattaggtttcctttctcatataactcttgtccttggattcagtggccctcatttttttcttttgctttgttttctgttactgttcatcacatattttatacagctgtcgatgttatttattcaaacgatgtaccagttccatttgtttgtttgtttctggagacctccctctggagctttccaccttcctggctctaatctggactggttgctttaggcctgtggtctaaacagctgttatttcaggacttccttgactgttctcctttgtttgccctttttttctgatctcatgggttttttgtgtgtactttttttatcttgcttacaccctcattttgctggtacttatctttcagtggcttttctaagaaagattatgtaggaagtagatttttttgactgcttgtatatttgatttgtttttccaaatgtgagaccatcccccatagttcttttatatttaaaaatatctttattccaccctaattttgattagtaacctagctgggatataattttgagtttaaaattatttttcttcataatttatagacattgctttttttcttttaaaggttccatgtcattctcattccttctatgtgactttttgtttgtttgtttaatttgtgtgcttagcacttggatcttaaaccctcctggactgatctcctaaatgtcctcttttttcttatttttcatcttcttgcctttaatttttttcccaattattgaggtattaatgcttagaaagtaaatgaaaatactgtcctctcaccattccacctttggttattctgaagaactgggacagccctcttcttttatttaatttatttatttgtatttttgagacagggtctcactctatagcctaggctagagtgcagtagtgcaatcaccactcactgcagcctcaacctcctaggctcaagagatcatcccacctcagcctctcacgtagctgggactacaggcacgcaccactacacccagctaattaaaaaaaaaaaaaacttttttgtagagatgacgtctcactatgttgcccaggctggtctcaaactcctgggctcaagcgatcctcccacctcagcctcacaatgtgctgggattacaggtgtgaaccaccgtgcatagccctagccctcttctaatgtgtgctatatcaaagtccacatcttcttctggaaataagcgaacttccttttgcttaaccagaggaaatgcagttctttgtaccctaaccttagtctctcctatgcacatctttgcattctctttttcacataccaactccagtaaacgatgttctcagttagggaactacctgttcccccttaatctattatctagctgtttaaaaaagatattcctgcacaattatgaaacccaaatatcttattactttctcttctactcaataattacgtattttctaccagtagtataatccagaaagagtttctgccttctatgcatggctcagttgaaaaaataaataagggccaagtgtggtggctcacacctgtaatcccagcactttgggaggctgaggcaagaggatctcttaaggctaggagttcaagattagcctgggcaacaaagcaagaccccatctctacaaaataaaaattaggccaggtgcagtggctcacacctgtaatcccaacacttygggaggccgaggcgggcagatcatgaggtcaggagttcgagaccagcctggccaacatggtgaaaccccgtctctactaaaaataaaaaaatcagctgggcgtggtagcacgtgcccatagtcccagctactcgggaggctgaggcagaagaatcgcttgaactcaggaggcagaggttgcagtgagccgagatcacgccactgcactccagcctgggtgacagagcaagactctgtctcaaaaaatataaaataaaaataaaaattagccagatgcactggtgtgtacctgtaatcccagctacttgggaagctgaggcaggaggatcacttgaaactagaagtttgaggccacagtgagctatgattgcaccactgcactccagcctggatgacagagcaagaccctgtctcaaaaaaaaaaaaaaaaaaaaggaaaagaagaaataaataagcaaattatgattagatgtgcaagcttctgcagggcagggattcattctgcacttttatatctgagagataggttctagttagaggctctgcccattctaagcgtttaataattatcagatgaaggctgggtgtgttggctcatgcctgtaatcccagcactttggaaggctgaggcagacacatcacgaggttaggagatcgagactatcctggccaacatggtgaaacccgtctctactgaaaatacaaaaattagctggccatggtggcgcgtgcctgtagtcccagctactcaggagactgaggcaggagaatcgctggaactcgggaggtggaggttgtagtgatcgcgccactgcacttcagcctggtgacagagcaagactccgtctcaaaaaataatartaattatcagatgaaagagtggatgactcacagagaaggtatttatttcattgtactaagatatttaccactgaagttccaagctaaatagagtgtttccttacacatctagtctggatgctttgggtcattgttgaatgcatttgaaggtaattgaacaatgacttggtgccatggtcaaccctgtatgttttgccctttggcacagtactgcccttttaaaattaggttatgcccagccagaactttggctgagttatagatgctatgatatgtagtagagctcaataattatttgtttacggctggatgcgatggctcatgcctgtaatcccagcgctttgggaggctgaggtgagcagatcacttgaggccaggagtttgagaccaacctgggttaacgtggcaaaaatctcgtctctactaaaaatacaaaaaaaaaaaaaaaaagttagctgggtatggtggcacacacctgtaatcccagctacttgggaggctgaggcacaagaattgcttgaacctggaaagtgaaagttgtaatgagcggagattgtgccactgcactccagcttgggcaacagaaggagactctgtctcaaaacaaacaaacaaaaaacatcattcttattattattatttgtttaatgaatcatgagtagaaacctatttcatgaaggttgtctgatcttgtaattattttcaatggatatatttatagtgttgctagtctgaggattcatttttttaaaaagctttactgagatgtaagtggcatatcgtaaaatttacccattttaagtatatcattcaatggttttgagtatatttacatagctttacagccatcccaacaatctaatcttagaatatttgcatcacctgggccatgtgtggctcatgcctgtaatcccagcactttgggaggctgaggcgagtggaccacttgaggccaggagtttgagaccagcctggccaacacagtgaagcctcgtctctaccaaaaacatacaaaatttagcagggcatggtggtgcgcacctagagtcccagctacttaggaggctgaggcaggagaatcgcttgaacctagaaggcagaggttgcagtgagccgagattgtgccactacactccagcttgggcaacagagtgagaccctatctcaaaaaaaaaaaaatgttcatcacccttaaaaaatctcatgcctgttagcattcagttttccttttctcatctccagccttaggcaaccactaatctactttcctttttttttttttttttttttttaatgtagagacagggtctcatgttaaccaggttggtctcgcactcctggcctgcagcatgccycctgccttggcctctcaaagtactgaggttttaggcatgtgtcgctactggccatcatctactttctgtctatataaatttgtctattctggatattttatgtaaatagcattatacaatatgagggctcttaaatctggcttctttagcataatgttttcaagatttattcatattatagaatgtatcaatactccattcctttttattatgaaataatatcccgttgtatggatataccacattttgtgtattcaccagttggacatctgggctgtttctgttttttggctattatgaataatgctgctatgaacattcatgtatgcatttttgtatggacatatgttttaatttctcctgggtctatacctaggagtggaattgctggatcatatggtaactccctgtttaacattttgagaaactgctaaactcttttccaaagtggctgcatcatttttatattcccactagtaattttgacattaaaatatatgagagttctgatttattcacattcttactaatacctgttattgtctttttttattatagttattctagtggatgtgaggtggtatttcattctgatttgatttgcatttccctgataactgatagtgttgagcatcttttattgtgcttgttggtcatttgtatgtcttctttggagatatgtctggtcatttttcaattaggttatttgccttgtcattgagtagtaagagttctttgttctagatacaaatctaaaatcagatatgtgatctacatatgttttcaccaatctgtgggttgtctattcacttttttgatgtcatttgaaacacaagtttttaattttgataaattccaatttatgtgtttgtcttttaccgcttgcaattttgatggtgttatcaatggtgtaaaaatcattgcctaaccgaaggtcactaaaattaactcctgcattttcttctcataaaattttagctcttacatttaggtctttgatccattttgagttaatttgttgcgtgttgtgaggaaagtgtgcaaattgattcttttgagtgtcaatatcccttgtcgggcccagtgcagtgactcatgcctgtaatcccagcactttgggaggccaacatgggaggattgtttgagctcaggagttcaagaccagcctgggcaacatagtgagacctcatctctacaaaaaatacacaaaaacaaaacaaaattaaatgggcatggtggtgcatgcctgtagtcttagctacttgggaggctatggcgggaggattgcttgagtcccggagatcaaggctgcagtgagctatgatacaccactgcactccagcctgcgctacagagtgagaccctgtctccaaaaaaagaaacaaacaaacaaacaaacaaacaaaaaaccacttgtcctagcacctttgttgcaaagattaattagtcccccattgaattgtcttgttacctttgttaaaaattgagggtccatttataacaaaataatgttttcctaaagttaaaagttgctactgttacctctcaattttaactttttttttcttttttaattaatgttttttacccatggcaagctgtaatagcttttttgaggggaggtaggtgcttkataaagaacagtaggtgctgcttatcaacagatgaaaggagggttctttttcaggcaaccatctcatttgtgagtgaatgsactttctctttaaagtgctgggattgttagtgccatttttattgtaaatatcagaattgttattttttgtcttctacctaagaattctgtctcttaggctttctcttcccagatttcccaaagttgggaaaagctgggttgagagggcaaaaggaaaaaaaaagaattctgtctctgacataattagatagggaaccagttgggaagctgtaagaataatgcaggtgcaaggtggtggtggtttgagccgggtgatagctgtggatgtagaaagaatctgaatatattgtgtcatagggttgacctgatttgctaatggagtagttaaggatgtgggaaagtggaatcaagcatggctccaaggtctgggcctgaaaaaccgggagaatgagttcacattaactaagacgggaaagacaatggtaggggcctgtttagggaagagctaggaagagattagcatctcatttctaatgatgtaatacatagaatcttgcaggagcctttagtgaagtgtagtttaagtcatctaatactaaaatttatataaagtgtccagaatgccttttactgtaaataacttattaaaataataaactgcataatattaagtgtgatatttgtcagagatgttaagtgattataggactcccaaactaagaatgctttataattatcatcagtattcccctttaccttggggcatgtagaactggctttaagatgtgttttgtggggagttttctgtgggkttttttttttttttttttttttttagatggagcctcaccctgttgcccaggctggagtgcagtagcacgatcttggctcactgcaacctccgcttcccaggttcaagcgattctcctgccttagcctcccgagtagctgggattgcaggcatgcaacaccatgctcagctaatttttttattttcagtagttatggagtttcaccatgttggccaagctggtctcgaactcctgacctcaagtgatccacccgcctcagcctcccaaagtgctgggattacaggcatgagccaccatgcctggcatgtatttatatgtttaaattaaaagatgtttcaacggcatggtaattggcatagagctgagacagatagataaaaggaacagaaaaaaaatccagaaatattcctatgcatatctagatagttgatgtatttaaaaagcacaaaggcaatgcagtggagaatgtatagtcttttcaacaatggtactggagcaactgaatatccatatgcaaaaagaaaaattgaaccttaattcataccttttaccacatacaaaaaataactcaaaatgaatcaaagaccattgaaaacaacattataaaactcttggaagaaaacactggagaaatttttttctaccttgaattaagcaaagatttcctatatgatattaaaagcgtaaaccataaaagagcaaatagataaactgaactgctcttcaaaagtgccaataagccaggtacagtggtacacgcctgtaaacccagctactcaggagactgaggtgggaggatcctttgagctcagcacttcgaggccagcctgggcagtgtagtgagacccagtctcttacaaaaatgcaaataagagaatataaagataaaccacagactaggagaaaatatttgcaaagcatatatctgataaaggattaaaaactacaccattttaggccaggcgcggtggctcacgcctgtaatcccagcactttgggaggcccaggtgggcggatcacaaggtcaggagatcgagaccaacctggctaacatggtgaaactccgtctctactaaaaatacaaaagaaattagctgagcatggtggtgggcacctgtaagtcccagctactctggaggctgaggcaggagaatggcgagaaccagggaggtggagcttgccgtgagccaagatcgcaccactgcattccagcctggacggcagagcgagaccctgtctcaggaaaaaaaaaaaaaaaaaaaaaacctacaccattttgggccaggcacattggctcatgcctgtaatcccagcactttgggaaccgaggcagacggatcatgaggtcaggagatcgagaccatcctagccaacatggtgaaatcccgtctctaccaaaaatacaaaaagtagctgagtgtggtggtgcatgcctggaatcccagctacttgggaggctgaggcaggagaatcgcttgaacctgggagttgaggtttcagtgagccaaggtcatgccactgtactccagcctggcgacagagactccgtctcaaaaaaaaaaaaaaaaaactacaccattttaaaagtagccaaaaggtacttgaaaattgccaagaaagtagattttaagtgatctaccacaaaaaaagtaataagaatatgaggtaatgcctgtgtcagttgtctcaacttggccattccacaatgtatacacattttaaaaacacatgttggccaggcacagtggctcacgcctgtaatcccaccactttgggaggccgagatgagcagatcacctgaggttgggagttcgagaccagcctgaccaacatggagaaaccctgtttctactaaaaatmcaaaaaaaaaaaaaaacaaaaaaaacaaattagccgggcatggtggtgcatgcctgtaatcccagctacttgggaggctgacgcaggagaatcacttgaatccaggaggtagaggttgtggtgagctgagattgcgccattgcactccagcctgggcaacaagagcaaaactccatctcaaaaaaaaaaaaaaaaaatgccaggcactgtggctcatgcctgtaatcctagcactttgggaggccaaggcaggtggatcacgaggtcaggagttcgagaccagcctgaccaatatggtgaaaccccgtctctactaaaaatacaaaagttagccgggcatggtggtggtcatctgtaatcccagctgctcaggaggctgaggcaggagaatgaacttgaacccgggaggcagaggttgcagtgagctgagatcatgccactgcactccagcctgggcgacagagtgagactccatctcaaaacaaaaaaaaacatgttgtacaacctaaatatataccatttttctttgtcagtttacaaaattatttaatcaactttaaacataaaaatggccaaaagatttgtacagttacttcaccataggaggtgtacaaatggcaaactcatgaaaaatgcttcacaccattagtcactagggaaatgcaaattaaagccacagtaagcactacaaaccttagaataactaaaagattgaaaagactggctgtgccaaatgttggcaaggatatggaggaactggaactttcatgcactgatgatgggaatgtaatggtacaagtagtttggaaaacagtttggcaatttctttttttcttttctttttttttttttttttgagaccgagccttgctctgtcccaaggctggagtgcagtggcctgatctcggctcactgcaacctccgcctcctgagttcaagtgattctcctgcctcagcctcctgaatagctgagattacaggcatgtgccaccacgcctagctaatttttgtatttttagtagagacggggtttcaccatgttggccaggatggtctcaatctcttgaccttgtgatcctcccgcctcagcctcccaaagtgctgggattacaggcgtgagccactccacccggccagcaatttcttaaaagttaagcatatacctacagtttgatatggccatactactggtatcttacacttaggtaatttactgaagagaaatgaaagcatatacagcctgggagccgtggctcaggcctgtaatcccagcacttcgggaggctaaggcgggtggatcatgaggtcaggagctcaagaccagcctggccaagatggtgaaaccctgtctctactaaaaatagaaaacttagccgggcgtggggggcaggggggcacacttgtaatctcagctacttgggaggctgatgcagagaactgcttgaacccaggaggcagaggttgcaatgagccgagatcgccccactgcactctagcctgggtgacagagtgagactctgtcattaaaaaaaaaagcatatacaaagacttgtacaagaaaattactgacacatgaaacaacttgggtgaaacccaaaatgattatgttgcatgaaagaaagcacagtacgtattgtataattccacttacataaaactttagaaaatgcaaactaatctatagtgccaaaacagataggtggctgcctaaggataaaggagagcaggtaagggcaggagagaaaggttacaaaggagtcctcaataatttttaagagtgcaaagggattctgagacatgaatatttgacaacctctgctctgtagagtcagaagacccttaggcttgttgaaccatgctctagtatgatattgaaagtgttatgcagtaatattctttcytatttccaagtatggaatcctagcattccaagagagaattccaacaatgtgctgaatagtgatgaaaccattgaataataagtatatgggttccataaggtggttaaagaacaacatctaacaggtttggaattttagctaaaaagggaataataataatttacctctttgtagaggagtaactcattggttaagtcttagtaggtttattagaaacgtgaatctcattaattatagcctgtgtctgaacattgtgagctataagaaccctcatattaatggttaagggactgttggaaatgatgtgattttattaaaaatggggtctttgtggaggagtcaggaatggtcaaaatgagcttcaggtatggggcttgctctgtgctcctgataccaagggtctggcaagcacaaaggaaggtgagagagtttatctggggggactcaaggaaaacttcctgaaagaggtgtcctttgagaattcccacaggtataaatgaggagggaggcacttcagggaagggaaccactgagagcacagagaaggcaagaagcttctggattgtttagggaacagcaagagatctggtgtaaacagggcgtgggagttggaagaatgtgtaggaagaataaaaccagaaaggaagatggtcagatcctaaagggatttcctgccatagtgacagctggaggattcattctgcagtgggagcggaatttgagagaattggacgtgtattttaggacaataacrctagcggcattgtaaagaggcccagagagaggaagtctagaggcaggaccatttaggaggactcacattttgcctttactgagggttgacgtaatcagaggaatgcttgatggaaattggttagagggaagggagaaacctgcctggtatttgggaggtagggtggggtggagtggtgtggtgatcattatctgagatagggaatcctggaagaagagcagtttggggccggaaggtggggtggacttttcatttacttaaggacatgttttgtttttttgttattgtttttgagacaagagtcttgctctgtcgcccaggctggagtgcagtggcacgatctccgctcattgcagcctccgcctcccaggttcaagtgattcttctgcctcaacctcacaagtagctgggattacaggtgtggaccaccacacccagctaatgttttgttttttttagtaggcacagggtttcaccatgttggccaggctggtttcaaactcctgacctcaggtgatctgccaccatgcatagccgaagagatgtattttgatgagcagaagcttttcatttaaataaaatgcaatttattaattttttattttttataaagaggttattctcatctcatgttaattgctttttttttttttttttttttgagacagtatcactctgttggccaggctgaagtgcagtggcacgatctcagctcactgcaacctccatctcccaggctcaagcaattttcctgcctcagcctcccgagtaggtgggattacaggtgtgtgccatcacaccyggctaatttttgtatttttagcagagacggggtttcaccatattagccaggctggtctcgaactcctgacctcaggtaatctgcctgccttggcctcccaaagtgctgggattacaggtgtgagccaccgcgcccagccgttaattgcattttttaaaagattttatttatttggtctgagcacagtggctcacgtctgtaatcccagcactttgggaggccgagaagggcggattgcttgcactcgggagttcaagactagcctgggcaacatarcgaaatcctgtctctactaaaaataaaaaattaaccagccaaacatcttatgtgctcactcataagtgggagctaagctatgaggacacaaagcataagaatgatacagtggacttttgtggactcgagggaaagagtgggagcggttgagggataaaagactgcacactgggtacagtatatgctgctccagtgatgggtgcaccaaaatctcagaaatcaccaccaaataacttactcatgtaaccagacaccacctgttccccaaaaacctattgaaataaaaattaattaattaattaaagtaagtaaaagaaaaaaaattagccaggcatggtagcatgcatctatagtcttagctactcaggaggctgaggtgggagaatcatctgagcctgggaggtcgaggctgcagtgagctgagatcatgccactgcactccagcctgggagatggaacaagaccctctctcaaaaaaataaaaaaataaaaataaaaggttttatttaagactttttttctcccttcttctctagatataattgaccctgcaatcctgcgcccgggccgcctggacaaaacactgtttgtgggtttaccgccccctgcagatcgccttgccatcttaaaaactatcacaaaagtgagtaaaggaaatggtatatttytgtatatgtttctcttgttttaaatagagacagttataagaggtagtaattttcgttgactgattactttcttttctgtagctgtgtttgcccagcctatatctcccaaagggaaggtgaactgatcttcgattattactttaaaataatttacatcagatcatatttgaaatggagtagaaacttttggagaaactggcactttgggagggcgaggtgaacccaggagtttggtaccagcctgggcaatatactgagactctgtctctacaaaagatagaaaaaattagccagatatggtggcacccacctgtgggaccatgtactcagaaggcttaggtggaaggattgcttgagcccaggaggtcaaggctgcagggagctgtgatcacaccactgtactccagcctgggcaacagagcaagaccctatccttttttttgaggcagagtcttgctctgtcacccaggctggagtgcagtggcatgatcttggctcactgcaagctctgcctcccaggttcacgccattctcctgcctcagcctcccgagtagctgggactacaggtgctcgccaccacgtccggctaattttttgtgttttttagtagagacggggttttaccgtgttagccaggatggtctcgatctcctgacctcgtgatccacccgcctcggcctcccaaagtgctgggattacaggcgtgagccaccgcaccagaccccgcaagaccctatatttaaaaataaataaataagtgggccaaacacgttggctcacacctgtcatcccagcactttgggaagccaaggcaggtggattgctttgacctcaggagttcaagatcagcctgggaaacatggggaaaccccatctctacaaaaaatacaaaaattagctggacttcaatggctcatgcctggctgaggctggagaatcccttgagcccaagaagtggaggttgcagtcagccaagatcgtgctactgcactcaagcctgggtaacagaccaagaccctctctcaaaaaaaaaaattgaatgacttctgtcatcccacttctcactacctggaactagtttttctgcccttcacacatcacattttgaggtctgtagaagtgctttgtttctacatttctatagccttgggatgggagagggagctaagctggtggtgttaatccttctggggatgaaatcacttgtacctggacccgctctctccrtccagttggagatacctccccccatgggagctgtcccactcccatgggattgtacccagttctgtccagctccctggaaagtggcataccttggcagttcttcctgaatctgctgaaatcccttgattgtgtgtgtctaactttttctagagctatcttctcctcaggctgcttgtctccagcttggaatattaatagacatcacaagattttgttaacttaccttctttcttcaatactccttcccaggaatggacgcctaattatcagccactttcaaattttctcttcgcacccacttttcaacatttgcagcatgaaggtttacccctttctttggttgctactggtaaattgtttaactttttttagtattcttttgatgctgacaaaggaagattctgtgatcctgcctcactgggccatcgttacttaaaactgcctttagcaatgttcctaaaaatcaccccgaggagggagaacagggcagatgagaacagaagaatgatcatctttgtagggtagaaagattctattgatgcacagtatggaaaatagcttgraagccagtaaagtaaaagttatgaaattaagcatgttagaactaaggcaatatgactgagaaacatcaatgaaaaagaaaaaataacgaactaaggcattatcacgggaataacaaagaagatatagacatgagaactgtttaaaggttttaattagtaggacattggattaactgtagagttgggagttaaaggaaaaggtagatgaatttgcagcttgtgcagctggtggcatctaccaggattagaggtctgggagatgagctctctgagtttcaggtgcctgggcactatcaagtggaaaagttgagcaggatgttgggtctgtggttgggagttcaggagagtcctctggctgggctatagttttgtctgtcttcaggacatagctggtggtcaaagccatgaaaacatgttgctttagtttagtagttctcaacctaaggcaattttcccaccaccccacctcacgtccccagggaacatttggcaatgtctagggacatttaccactacgcagaggagtgatcatgctgctaaatattccacagtgcacaggacagccaacaacaaagaattatccaaggccaggcatggtggctcaggcctgtaatcccagcactttgggaggctgagacaggaggatcacttgagactaggagttggagaccagcctgggcaacagagtgagaccctgtctctacaagaaaacaaattttttttttttgagacagagtgtcactctgttgcccaggctggagtgcagtggtgccacctcggttcactgcaacctccacctcccgcattcaggtgattctcctgcctcaacctcctgagtagctgggattacaggcgtgcaccaccaagcccagctaatttttgtatttttagtagagacggggtttcaccacgttggccaggctggtctcgaactcctgacctcgtgatccacctgcctcaagtctcccaaagtgctgggattacaaacgtgagccactgcgcctggccaagaaaattttttaattagttgggcatagtggcatgcacccgtagtcccagctacttggtaggctgaggtgggaggatggcttaaccccaagaagtcgaggctgcagtgtgccatggtcacgtcactgcactccagcctgagcaacagagctgagaccctgtctcaaaggaaaaaaaagtattatccgactcaaaatgtcagtaatgccaaagttaagaaaccctgctttggttgcatatacttatttctttgcatcaaacaagcttgatgatgactgcatcatagcatcttctctccctttcgttggctctgtttttttktttttttttttgacacagtatgtcaaaaaaagagaccctgtttgttgcccaggctgaagtgcagtagcgtgatctcagctcactgcaacctccacctcctgggttcaagcatatctcctacttcagcctccccacgcagctggggccacaggtgcatgccaccacactctgctaattttttttttgtatttttagtagagacggggttttaccatgttagccaggctggtctcaaactcctgacttcaagtgatccgcccaccacggcctcccaaagtgctgggattacaggcgtgagccaccatgcccggccttcttggctctgtcattaggaactatggtcttgagattttgtttgctttggtcaatgtatgtggatgtgtatgtatatacaaataagcacacacatataatccaattttgtttctatgaatttcctgtagtcatggtgacataatgataatgctttcacacttgtccttgggatttcatgaactaaagagaaaagttggattggtatttatttctagacatgccagacatgaggcatgtggtattcagagctttatagatttggaaccagagaatgattggctcattcttcctgctgtgtttcattcaatgtatggtactcacaccagaacaactttatacttcattcatctagaatttcagtgctatttgccaaaatcattaggcctcagaccaaagggtgaatatttaaagtaccccacttcggccaggcacagtggttcatgcctataatcccagcactttgggaggccgaggcaggtggatcacttgaggtcaggagttcaagaccagcctggccaacatggcaaaacactgtctctacaaaaatacaaagattagctgggtgtgatggtgtgctcctgtaatcccagctactcaggaggctaaggcaggagaattagcttgaacccgggaggcagaggttgtggtgagccgagatcgtgctattgcactccaacctgggcaacaagagcaaaactctgtctccaaaaaaaaaaaagtcatctggcataaatggggtgggtaacagagaggagccctgcagcttccaagcacaaagttgtgaatatggaagaagaaaaaaatcaaaaaagacatttcaatagaggtcaactttggccgggcatggtggctcacacctgtaatcccagcactttgggaggccaaggtggacggatcccacctcccgagtagctgggattacaggcacgtgctaccacgcccggctaatttttgtatttttagagaaatgaggtttcaccatgttggccaggctggtctggaactcctgacctggtgatccacccacctcggcctctcaaagtgctgggattacaggtgtgagccaccatgctgggccaaaagcaacttttgtagattgtggtttagactgctgcatagtcagtcctcagcctctgtctgtgccaacggcagaagggcttttgttagtttattctctttgacttgagagtgcatttttgctccaattctgactgtgtcctattctaagacttgraacctcattgggcagagctgcccaggaggagcaggacccacatgcagcctccctgtgccctgtctgcctgcgttggcctggtgccctctcaagagagctgttagcagtgcaatttcacatccttatcttacctcatccttcagaggtcatgaatgtttttgtttaaaaagctttgttgatggctaaagcagggcagaktgagaggaagaggaagcacaatatctaatttcagaggggagaagtcacaaggcagacttcctgcccatgtatgttctttgtaagtcaacagaaagtgaggaaaattggcatttttaatgtttaccctttttatttcagtttgctggcttttgactttaattcctcagattgttttatatacaattttctctttctcctattaacatctgaaatattataaggagattagaataaagatctttagtcctgttcttaaaagtctgaaatattttgtaggtcaaagcaacttcttcatatcttttgggatctaagttttgtaaaagaagagcgagtgggccaggtacagtggctcacacctgtaatcccagcactttgggaggccaaggcgggcggatcacgaggtcaggagttcgagaccagcctggccaatatggtgaaaccccatctctactaaaaatataaaaattagctgggcgtggtggtgcgtgcctgtagtcccggctactcaggaggctgaggcaaaagaatcacttgaacccaagaggcagggattgcagtgagccgagattacgccactgcactccagcctgggcaacagagtgagactccatctcaaaaaaaaaaaatggagaccagcctgaccaacatggcgaaaccccatctctactaaaaatacaaaaattagccgggcgtggtggcatgcgcctgtagtcctagctagtcaggaggctgaggcaaaagaatcacttgaagcagagaggtggaggttgcagtgagccgagatcacgccactgcactccagcctgggcaacagagggagactccacctcaaataaaaaagagcgagccatatactacttttttatattttttatttggtatttctagtgatgatgtggtgataagaggtctatcactaaaagctgcctgagaagtagaaatttttttttttgagacggagttttgctcttgtcgcccaggctggagtacaatggtgcgatctcagctcactgcaacctctgcctcctgggttcaagtgattctcctgcctcagcctcccaaatagctgagattacaggtgtctgccaccatgcccagctaattttgtgtttttagtagagacagggtttttccatgttggccaggctggtctcgaactcccgacctcatgtgatccgccctccttggcctcccaaagtgctgggattataggcatgagccaccacgcccggcccccagatttttttttcataacttctacttccttttaagtgtcattaaaatatctcagaaaaccagaaacattatttgatatctgccaaatactttcagataaaatacagtctttaaaagagtgacaaggccgggtgtggtggctcacgcctgtaatccagcactttgggagactgagacaggcgaatcacaaggtcaggagttcgagacctacttggccaaaatggcaaaatcccgtctctactaaaaatacaaaaattagctgggtgtggtggccggtgcctgtaatcccagctacttgggagactaaggcaggagaatctcttgaacccgggaggtggaggttgcagtgagccgagattgtaccactgcattccagcctgagtgacagatcgagacctcatctcaaaaaaaaaaaaaaaagtatgacttaagaatacctgatataataatagctaacatttattaagcccttactctgttccatgtagtattttcattttacatttatacacatgcttaaaccttgaaactccctttgaagtgtatgtcttacaaaatatttaaatattttccttttactgatgagcaaactttttacaaacttttttgttgttgttgttgttgagacaaggtcttgctctgtcacccaggctggagggcagtggtgcggtcttggctcgctgcagcctcaacctcccaggctcaagtgatcctcccgcctctgctccctgagtagctgggactacaggaacgtgccaccaggcctagctaatttttttttttttttgtagaaacagggtttcaccatgttgcccaggctggttttgaactcctgagctcaagcgatgtacccacctcagcctcccaaggtagagggttacaagactgagccactacacccggccctttcattaatttttcacagtcgactgtgtgaataaaaattgcttcatgcagaagctggattttaaaataaaaaataaataaataaataaaattactggccaggtacggtggctcacacctgtaatcccagcactttaggaggccaaggcggacagatcacctgaatgaggtgatctcattcaaaagtagctgggtgcggtggcacacacctgtaaattccagctactcgggaggctgaggcaggagaatcgcttgaacccagaggcagaggttgcagtgagccaagatcgcgccgttgcactccagcctgggcaacaggacgaaactctgtctcaaaaaaaaaaaaaaaaacaagcattaatgattctaaactctgatgtgtagttaagaatagatttaagaataaatttggttgggcatggtgastcacacctgtaatcccagcactttgggaggccgaggcaggtgaatcacctgaggtcaggagtttgagaccagcttgaccaatatggtgaaagcccatctctgctgaaaataccaaaattggccaggcatggtggcgtgcacctgtagtcccagctactcggaaggctgaggcaggagaatcgcttgaacctagtgaagtgagatcacgccactgcacagcctgggcatagagtgagactccgtctcaaaaaaaaaaaaaaaaaagaatagatttgtatgaccaaatgaaaatatttgttaaaataaaagtagtagcacatcttgaattactttttgaacctgagtatttcataacatataatgtttaatacgaattataggaaaatatcagtgtaaatgagccataacttttttcagattttagtaaaatactatagatacataacataaaatttaccattttagccatttttaagtatatatttctgtggcattaagtacattcacattgttgtgcaaccatcaccactactcatctccagaacttttgcatcttcccaaactgaaactctgtccccattaaacacaaactgcccattccttcttccctacccctggcaaccaccattctactttctgtctctatgctttgcctattctaggtacctcatacaagtagaatcatacaatatttgtgggatataactttttttttttttgagacggagttttggtcttgatgtccaggctagagtgcaatggcgtggtcttggctcactgcaacctctgcctcccaggttcaagtgattctcctgcytgagcctcctaagtagctgggattacaggtgcctgccaccacacctgtttttctttttctttttcttttttttttttttgagacgaggtctcactcttgttccctaggctggagtgcagtggtttgatctcagctcactgcaacctcctcttcccgggttcaagcgattctcctgcctcagtgtcccaagtagctgggattacaggcacctgccaccacacctggctaagttttgtatttttagtagagatggtgtttcaccatattggccaggctagtctcaaactcctgacctcaggtgatccacccgcctcggcctcccaaagtgctgagattacaggcatgagccaccacgcctggcctataatttccttaagagactattttccttctttttctaataattcctttagcttagctttctatagttaccaacctatttgagatttccattagggcctttattaaaaaataatataatattatcgtaatagagataatgtcataaagaaaaaccaaattaatttaagcttctaaatacttctaaatatcctagtactatttcaataaatgattttccaaaatcctcatattttgttttataagctctttattatgccatttaaaatttttctctttgctctcacttgagaataaatagaattcattttagttcttactataagtcagaaacataaccacatttcaattaaagaatagttagatttcagtgatccaaagattccttagcccttatttytactaattagaaagtaatgttgctaatgaaacttttggaggtatcctaggtagagcacacctcatgccctcaaaaaaaggagagtttggctgagcgtggtagcttgtgcctgtaatcccagcactttgggaggccaaggtgggtggatcaccaggtcaggagtttgagaccagcctggccaacatggtgaaacccatctytactaaacatacaaaaaattagccgggtatggtggtgtacatctgtaatcccagctacttgggaagctgaggcaggagaatctcttgaacccgggaggcggagcttgcagtgagccgagatcatgccatcacactccagcctgggccacagggcgagactctgtctcaaaaaaaaaaaaaaaaaaaaaaaaaggacagtttgttactttctttcaagtgagggtacttgaaattatttctttttctaaaggtttaatcttctaagaattaggaaacttctgagagtatctaaacatataacagtgaattcgttttgtgaagttcataccccacctcatttatttattgtgttcctttatatactgagctttctttcacaaaagatttttcttaaacaaaggatatgctaagaatagraagctgacaattgctcccattatgcaaatgtgaggaaaattcctcctctgctgggcgctgtggctcacgcctgtaatcccagcactttgggaggcggaggcgggcagatcacaaggtcaggagtttgagaccagcctgaccaacatggtgaaaccccgtctctactaaaatacaaaaactacccagcgttggctgggcacggtggctcacgcctgtaatcctagcactttgggaggccaaggtgggtggatcacctgaggtcagaagttcaagaccagcctggacaacatggtgaaaccccatctctactaaaaatacaaaaaattagccaggcgtggtggcgggcaactgtaatcccagctacttggggggctgaggcaggagaatcgcttgaacctgaggggcggaggttgcagtgagctgagatcgcaccactgcactccagcctgggcctgtgacagtgagactccgtctcaaaaaaaaaaaaaaaaaaaaaattacccagcgtggtagcgcatgcctgtaatcccagctactcggggctgaggcaggagaatcgcttgaacctgggaggcgtaagttgcagtgagccgagattgcgtcactgcactccagcctggtgacacagcgagacagaaaaaagaaaaattcctcctctgggtcctcacaaagagaacactaagatgcgatgcacaatgtctttaacggtatttctgacacaaacacaataagcctcttgggactgaggcttgtcattttcttaatataaactgagggtattacacaaagccagttcattaaatacaatttgatgaaggtccaagaaatgcactctgaggatgcacaggaccttgtggaggtccagcttaacccaagggtagaatttagatattgagaagtataaaagaattgtcttcttatgattcagcttttgattaaaacagggcactggatagtttgagattagattgtctaacagcacgcggagtgtccttagggaagatccgtacagttaatgtgacagtgtgacagtcgaggtaagttgataggttcttaaaatcatagaaagcacctaacaagggctcctacmtaatgtggcagccccaccaccatagcaagaaagtctacgctagtcttcattttaagaaatcactattatatgttcactgatgcccccctcccctctcaaatatagcacaaaattatatatactcatctggaaataagatacttatctattaagatactttaaaaaattaaataataaagattaacaaagttctataagggccattcagttgcaaatttgaactttagaactcaggttttctaattcctcgcccagtgttrcttgcactgtttaggtctttttattgaagtatgatacacctacagaaaagtggtaaatgtaaagtagatttagagattcaagaaaraaattaaaaagtggtaaatgtccagctccatgaattgttacaaagtctccagatcaagaaagagaacactccaagtctaattcatagaactatgaagtacaatggtgactgccagaggttgggaggcgggggcaggaagaatggggagttagtgtttaatggatgcattgttttctttgggaagataaaagagttctggagccggataggggtgatacaacaatgtggatggacttaatgccactgacctgtacacagaaaaatggttgaaatggtcagttttttgtatgttttgccacaataaaatagaacattcccacaccgacaaaagctgcccttctacttccagccactacccacttctacctgcccccaggattgaccactatcctgactcggttgaaaattgtttacactaaaagatgcttagcaatcctacattctgaccctttagttttattacttagagaaaaaagcacaagattgtttgcctaagatcatagtttgtgtcccaggtcaaaatggattgaatgggaaattaactgtttcttgaacctgtggtagataacatgtccattttatttagtgatagcaactaacagatgtataatttatgcagttcttgaacatgccctgctgggaggcagtgagacgctggtatgtgagtgtgggcagagcaacaggtaactagtgcacaaggccggcagctccagtcctctcagccaggtcgccgaaccctgtgcctggagcactttgccaggctgacgttttacactaagaaaagcttactgggcaggtgctgtggccctcacctgtaatctcagcacttcgggtggccaaggcgggcagatcgcttgagctgaggagtttgagatcagcctgggcaacatcgtgaaaccccatctctacaaaaaatacaaaaattagccaggtgtgtggtgggtgcctatagtcccagctacccaagaggctgaggtgggaggatggcttgagcccgggaggtggaggttgcagtaagctgagattgcgccattgcactaagcctggatgacagagccagaccctgtctcaaagaaaaaaaaagaaaagagaaaagcttaatggcttgtgtttattcacttttgtgtgtgtttcttcttttttttttttttttttttttttgaaaccaagtctccaactctccaactgtcacccaggctggagtgcaatggtgcgatcatggcttactacagcctccacctcccgggttccagtgattctcctgcctcagtgtcccgagtagctgggattacaggcacacgccaccccatcgctcctaggagacagaggttgcagtgagccaagatcgcaccactgcactccagagcgagactgtctcaaaaaaaaaaaaaagtagccaggcatggtggcatgtagttccagctcctcgggaggctgaggtagaaggatctcttgtgccgaggaggtcaagtctgttgtggttgttccactcactcctgcctgggcgacagagcaataccctggagggaagaaaaagcttgttttgtttgcctctgcagtttgtcactaaaaatattattaaacataatgtatgcatgcaagttactgggttaagtgttaaaattctgggttggttttttttcctctacatccagtctcwtgagaaattctaagagttctaagttacatacttgtcattgctaatgtgtcttgaaatgagctgaaggggaattggcaccaaaatcaagattgagtgttagctaaatgattaagaaagaatatactgagcttagagtgctttgtgcttttattttagagcagatactgctccttctctcctggccaggttcagtattatttcttccgtcctagccagcctcacaccaacactaagcattgcttaagtatttgccatgtttaagctggaaaggaaatgtgtttcttcacctttggaaagatcgaggtgctagttttcattcttgttgatggtgtttagtatttgctgcagctgtacacaaattcctcaaacttcatgagcataaattgtttgcctttagctttctcaagtttggaatctgcttcttagcctcatttctcaacattgaaatttgtataaaccttaacagcaccagtctggaagtcagttatactcatttagtcaaacagccattattaagaacctattatgtagatgartatggtctttatctttgagactcagtctcactctgtcgcccaggctggagtgcagtggcatgatctctgctcactacaacctccacctccagggcttgagcaattctcgtgcctcagcctcccgagtagctgggactacaggtgcataccataacrcccggctaatttttgtatttgtagtagagayggggttttaccatgttccacaggttggtctcgaactcctgacctcaggtgatctgcccaccttggcctcccaaagtgctgggattacaagcatgagccatcgcacccggcatggtctttaaagctccaatgaaaaatcatttttctctcttacttagaatggtaccaaaccaccactggatgcagatgtaaatttggaagcaattgctggtgaccttcgctgtgattgctatacgtaagtgtttaaatcttaagtcaattcactctctggggttcaatttcctcatctataaaatgaggggtgatgatgctcacctcagcagattgttgggaggattaaatgaggtatcccatgaagcacataaagtgtctggcatctcccttcttagagaagagactgcacatttggaggccctgaaggaattcctgggaacaggggagtcctttcatatgttgactcttggtacttaacctaccctaaccagcactgctgtcctttacaaattgtactggtgcgtcagcatttaaaagagactaatctacaagtgccacattttgcagccctcaggatgcattttcacctccacatagcctgtagtaacatcaggaaatctgacatttctgccttcatccttcctatgtttgtgttgttacagttattagtttttcttcatatgttttgaagtaaatttgtttgttaactttcccaatttggggacacagagggaggaaatgaaactcaagtttaactaacagagacaatgccccctccggctttttgttttcttttttttctttttttttttttccatacagggtttccctctttcacccaggctggagtacagtggcatgatcatggctcactgtagccttgacttcctgggctcaagcaatcctctgacctcagcctcctggatagctgggactacaggtgcatgctaccatccccagctaattttttaaaaaaatttttgtagttttagggtctcgccatattgcccagtcttgtcatgaactcctgagcttaagtagtccctcatgcctcagcatcccaaagtgctgggattacagtgagccaccacacccggccctttttttttctctattatgtccttccaatgtagcagtgattctcagtgaagagaaactgatcagagtctcaggcaggggtggtgaggggcagatgtaaatgcctctacctccccttaaataggatgtgcctcaccccctaattaggaatcaaatccatacgagtctttatttaaatgatgtggccaggcacagtggctcacgcctgtaatcccagcactttggaggctgaggtgggcagatcacttgaggtcagaaatttgagaccaacctggccaacatggtgaaaccttgtctctactaaaactacaaaaattagccgggcatggtagtgcacacctgtaatcgcagctactagggaggctgagacaggaaaattgcttgaacccagcgggtggaggttgcagtgagctgagatcgtgtcactgcactccaggctgggcaacagagcgacactccatctcaaaaaataaaaataaataaaattaaaaataaagaaatggccttatgcttaggagactactacttgagtagtttactgctttaagggtgggagcagtggctcacacctgtaatcctagccctttgggaggccaaggcaggcagattgtttgaggccaggagttcaagaccagcttgggcaacatagtaagaccccatctctacaaaaaaaataataataatacagctttaagtgctcaaatctgaaaagattttcggtgagtaacaggtgattttggtggcggaacttgccctgggctaaatcttttggatataccaagtaggctatcagtctgtgaaggggttagggctaaagttgaatggtgtacattttggattttcatgccactataattacagtttgagagacactacaccactacagtctatagctatctgcttgtgttagttaatggtgtttccaccaatgttagatttcatagtatgggaaggaatgaataccccagcaggtatgtgattattaaataatgttataaccctaacatttagccaacaaaacaccagattcagttaaaaatttaagctctgtgggtctttacttttatatagtatgtgtctgaggcaggagaatcactcatacccaggacgcagaggttgcggtgagccaagatcacaccactgcactccagcctcggtgacagagcaagactccatctcaaaaaaaaaaaagttatatagtatggggattatcaacattatataataagtttaatgtccagagatgaggttttttaaaaaaatttatttttcattttcatcttttctttccaagacttgtgaatcatagaagtgatgtttttatccccaaactcaaactctttctcatataatctctaagaaycctgttacagctgtaatgtagtgaaactccagtcaacatgagtgtctttcattgaactcagaactgtgctgactcagcatattattacatgaactaattaaataagtgaaggcctgttttgtatttgtcatattttaagtaacttatgatgtgttcattcagttttaacttgaatcaggtgcattaaagactttccagggtttgtatttttcccttctgaacttggagccacaagtgactttttggggggttttcttgagacagggtctcactctgtcacccaggctcactatagcctttgccccccaggctcaagcaattctgccatctcagcctcccaaagtgctggaattacaggcatgacccactgcgcccagcccataaatgactttttaataagcttactttagacattatgtaatacatgaatatgctagtcagcactttagccctttatgcattgtattgtttcctccataatttcctttcttcttgagtttagtttttttttgtttttgttttttaattgggacagagtctcactctgttacccaggctggagtgcagtggtgcgatcttggctcattgcaaccgccacctcccgggctcaagtgatcctcccacctaagcctccccagtgcctgggactacaggtgcatgccaccatgcccagctaatttttttgtagttttgtagatatggcatttctccatattgctgagactagtctcaaactcctgttcaagtgatccacccacctcggcctcccaaagtgctgggattataggcgtgagccactgcacctggcctagaaatatcttayataaaagctaagagctcttttctattgattgataatcaatttatttctcatctttattggtcactttttctcctgattatttaatatatgacttatatgaaaactgttttccgggtttttttctgggattttgcagtatctaagaataagtagataactattattttattgtaggggcgcagatctctctgctttggtacgagaagcttctatctgtgccctgagacaggaaatggcaagacagaagagtggaaatgaaaaaggtacaattctctccagaatctctcaattctaattatgatacttaaaaccactgttgccctggaaaatgaccattttctagtgtctattatctatgatattaaagctaacgtttttctaataagactgttagaagctgttctgaaatattaggtaacctctgttgctgacaattataataatagcaaagttatttagtacctctctaataaagagtactgtccctataggcaaatggatccattcgctgtcttcatcatgastctgggctgcttatcaattctggaaaaacgtattcttttgctaaggtgatatctacttgcctgttaaaatgcagcctaaattggagagcttagaaaatacacaagagaagtgaaatttggaataactttccatatgttgagactttcctttcaaaatataaaatctgtgtattgtgttatgtgatgctttggggccatctcaaaagctttgcaccatccttcacatttgacagtgtctttaatgttattatttgagtgcatatgggggaaaaaaattgtctgctgggtgtggtgactcacatctgtaatcccagcactttgggaagctgcggcaggaggattgcttgagcccaggagtttgagagcagcctgcgcaacaaaccaagatgccatctctataaaaaatttaaaaattagactggcatggtggtgcatgcctatagtcctaactacttgggagggtgaggcccaggagttcgaggctgcaatgagctatgattgcaccactgcactccagcctgagtgacagagcaaaaccctgtctctatttttattttgttatttttatttttatttatttattttttttgagacagagtctcgctctcactcaggctggagtgcagtggcgcgatcttggctcactgcaagctccgcctctcgggttcatgccattctcctgcctcagcctcccaagtagctaggattacaggcgccggccaccacacctgactaatttttttttttgtatttttagtagagacggggtttcaccatgttagccaggatggtctcgatctcctgacttcgtgatccgcctgcctcggcctcccaaagtgctgggattacaggtgtgagccactgcgcccggcctccctgtctgtatttttatttatttatttatttattttctaaacttgagtcttgctctgtcgcccaggctggagtgcagtgccgcgatctcggctcactgcaacctccacctcctggttcaagcaattctcctgcctcagcttcccgagtagctgggactacaggcgtgtgccaccacacccacttaattttttttgtatttttagtagagacgggatttcaccatattggtcagrctggtctcraactcctgatctcatgatccgcccacctcggcctcccaaagtgctgggattacaagcctgagccaccgcgcccgacctaaagctcccttctaaaccagtgctgagatatattatatataaaatattctatgatattatggctccataagatctcattgtgtgttgcatactcttaaatattaatactatggaatcctactttctattccagttacatttatttgaattatctgaataattctggctcttgttcataggcatcaccattaagttaaacaatgcaaagaggcctacaaaaagttaccaacttatgagtggcagatctctttgggtggttttggattaaaatctgatgagcagaatatatctggctagaatactgttctgaaaaagaacagagcccatctcatcactgatctctttagtggaccccttgaaagttttgaagtctttcaaaggaagttaagttctaagtcagttaccatacgatactgagatgtgtatatttgtgcatttactccataggtgaactcaaggttagtcataagcattttgaagaagctttcaagaaagtaagatcatctatatcaaaaaaggtaagcaatgccattaaatgcatagagaaaggaaactagaattttagaccagtagatatgacctcatgaattaaactctttttttttttttttgagacggagtcttgctctgtcgtccatgctggagtgcagtggtgcgatctctgctcactgcaagctctgcctcccgggttcacaccattctcctgcctcagcctcccaagtagctgggactacaggtgcccgccaccatccccggctaattttttgcatttttagtagagacggggtttcaccatgttagccaggatggtctcgatctcctgacctcgtgatccgcccgtctctgcctcccwaagtgctgggattacaggcgtgagccaccgcgcccggctgaattaaactcttttacagattgttttgtatactacttctacttcctaaaaagaaattacatggttcattttgatctgaaaacaagcaaaataattgcctttgtgagaatgttcttgagagattttaattttatatgtttcttagggactagaacacagttttcctaactagattctctaacaactttattcagaaagagaatgacctcttctgcctccacaatctcagattttttttttatttttttgagacagagtctcgctctgtcacccagtctggagtgtagtggcatgatcttggctcactgcaacctctgcctcctgggttcaagcgattcttctgtctcagcctcctgagtagctgggactataggtgcgcaccaccatgcctggctaattttttgtatttttagtagagacagggtttcaccatattggtgaggctggtctcaaactcttgacctcgtgatccacccgccttggcctcccaaagtgctgggattacaggcgtgagccactgcgcccagcccacaatctcagaattttaatcatctgattcaagtattatttgacctactctacgctttttgataaatggctttgtatttcttggagctagactgtacccaaactaagccatagggacttacccatacatttcagggaaataaaaacatcttcaccataggtgggagaagggttaaaaaaaaatcactctggagctgggcacaggggcttatgcctgttatctcagctactcaggaggcagaggtgggagaatggcttgagcccaggagttcaagatcagcctgggcaacatggtgagaccctgtctctacaaaaaaattaaaacttagccaggcatggtgtcatgcacctgtagtcccagctacttaggagaccgaggcagaaggattacttgagcccaggaggttgaggctacactgagccatgatcacaccattgtactccagcctcggttacagaacgaaaccttgtctcaaaaacaaacaaataaacacagaagaaaaaacacacttcaagtatttctttgggatgaatacacaggagtggaattgccacccaacatttaaaatgttaatttgccagacgcggtggctcacttctgtaatcccagcactttgggaggctgaggcgggcagatcacgaagtcaggagttcaagaccagcctggccaatatagtgaaatctcatctctactaaaaatacaaaaattagctgggcgcgcacctgtagtcccagctactgcgcacctgtagtcccagctactcaggaggctgaagcagaagaatcgcttgaacctgggaggcagaggttgcagtgagccaagattgcaccactgcactccagcctgggcgacagattgagactccgtctcaaaaaaaaaaatttttttttaatttgaccacagtgagattctactacacacctaccacaatgactaaaatttaaaatattggcaacactaaatggtggcaaggatatgaaacagctggaactctttttatttatttatttatttatttwtttttttgagacagagtttcactcttgttgcccaggctggaatgcaatggcacaatcgcagctcaccacaacctctgcctcctgagttcaagctattctcctgcttcagcctcccgagtagctgggattacaggcatgtgccaccacacccggctaattttttgtatttttagtagagacagggtttctccatgttggtcagcctggtctccaactcccaacctcaggtgattggcccgcctcagcctcccaaagtgctgggttacaggcctgagccaccacgcctggcctggaactcttatacattgttgctgaaaatgtagatacaaccacactggaaaacattctggcaatttcttttttttttttttttttttttttgagacggagtctcgctctgtcgcaatggcgcgatctcggctcactgcaagctccgcctcccaggttcacaccattctcctgcctcagcctcccgagtagctgggactacaggcgcccgccaccatgcccagctaatttttttgtatttttgtagagacagggtttcaccatgttagccaggatggtctcgatctcctgacctcgtgatccacccatctcagcctcccaaagtgctggcattacaggtgtgagccaccgcgcccggcccattctggcagtttcttatgaatgttaatgtagtgtaagaagcttctactttcccggcctggcgcagtggctcacacctgtaatcccagcactttgagaggccgaggcgggtggatcatgaggtcaggagtttgagaccatcctggccaacatggtgaaaccccatctctactaaaatgcaaaaaatttgccgggcgtagtggtgcgcacctgtagttccagctactcaggaggccgaggcaggggaatcccttgaacccaggaggcagagattgcagtgagccgagattgcaccgctgcattccagcctgggcgacagagtgagactccgtttcaaaaaacaaaaaaagaagcttctgcctttgcctcctttccatctggattcagtgtagtttagaattgtgctttcttcactaattagatagacataagactcttgacctgattttttaggaaaacttgagtcaacgattgtgaatgtcatggagtcccctgtggaaaggagcatgtgtaggatttagattaggatttagatgcaggaaggtaaaatatcacctctcttcaacagtaagttagtcagcaggagctactatgacaaagtaccacagactgggtggcttaaaaagtggaaaatttattttctcacagttctggagagtgttgggcaggattggttcttctggagcctttgtcctcactgatggctgtcttctcccagcgcctgcatgtgcttttccctctgcrcacatgctcttccctcctgtgccctaatcccctctttttgtaaggagagcagtcatattggataagagtctacctgtatgacctcattttaatccagtctcctctayaaagaccctctctccagttacaatcacattctgaggtcctgcgggtgcggactgcagcatgtgaattttggggggcaccattcagcccaaaacaagcagtgacggtctctgtattctgtgttctccctcctttcaggatcaaatcatgtatgaacgtttgcaggagtccctcagccggtgatgtctccagcagccggcttagaggagctagcccatcaagccggcagagaatcccccacacgctctgaaggacccactttcagctggacacaggcgcggcctcatgtaaacattttattttcaaatgaatgaggccaagctgaagctgaagctgaagattcttcccatctggccagccttgtgtgaaaatgccttcttcctctttaagaaaaaggacaatttttaaactgctgaaataaaatgactgttacatttttcaaataaaacttttactttgaactattttgactatacagaaaagttacagagatctcctcccccgccttccacaaccatctaggaataagtgccaacctgatgccctatcactcccaaatactgtcatgtgtattttctacacttgaagatattctcctacataacccaccatcaaagtcagggaattaatacattgatacatcactgccatctaatcctcctccattcacgttcctctagttgtcctgataatgtcctttaaaacaggtccctaacccccaggttggagacaggtacctatctgtctcctgttaggaaccaggacgcacagtgggaggttagtggtgggcgagcgagcattactgccttagctccacctcctgttagatcagtggcagcattagactttcatagaagcgtgaaccctgttgtgaactgtgcacttgagggacctaggttgtaccctccttatgagaatctgatgcctgatgatctgaggtggaacagtttcttcctgaaaccacctcccctgaccctgtctgtggaaaaattatcttccacgaaaccagtgcctgagcctaaaaggttggggaccactgctttaaaaggaggccactgcagttagttgctacattctttaatctcttttaagcgtggaacatttcttcaggtttgacttttgacacttgtgaaggtttcaggccagttactttgtaaaattccttgagtgtggatgtgtctgatgttttccttgtgattagactcaagttatgcatctttggcagattacaaagtgacactgtgcgcttgtcatgtggcatgcgatttcagtttgtcctgttactcatgatgttcactgtgatcacttgaggtagttcttccaggtttctcacactacaaagttactctttactctttttttttcactttgtaatgtatgtgtattttatgggaagttactttgaaactctataaagtccattcctcatcaaagtcaagtattactatttttaatatattatccattattatcattatgatattcaaactgtcccagatttgactctcctttggcctctatatgtttgatgagtccctaggcaatactttgtgaagggcttgatttttgttgtgttcaactcataatttacagtgttgctcacaatatatccggaagttatatatagatgggtcgggttacctacttttctttcttcttaaatttttacttcacctcattctacaaaaatttttaggctacttttaagaatgtggaccagtcacagtggcacatgcctgtaatcctagcatgtttgggaggcctaagtgggaggatcacttgagttcaggagttcgagagcagcctgggcaacatagtgagaccccccacatctctacaaaaagaaaaaaaaatgttacaaggccaggcgtggtggcttatgcctgtaatcccagcactaggccaaggcgggcagatcgcctgaggtcgggagttcttgaccaacctggccaacatggtgaaaccccgtctctactaaaaatatgaaaattagccgggcgtggtggcaggcacctgtaatcccagctactcaggaagctgaggcaggagaatcgcatgaacccggaggcggaggttgcagtgagccaagatcgcaccactgcactccagcctaggcaacagagtgagactctgtctcaaaaaaaaaaaaaatttacaaaaagaatgtggtgaaaaaatgttactaaaagcaaatcagggttacaaaggtcaataaaacagtctttttttttttctttttttgagacggagtcttgctgtgttgcccaggctggagtgcagtggtgcaatctcggctcactgcaacctccacctcccgggttcctgccattctcctgcctcagcctcccaagtagctgggactacaggtgcctgccaccacgcccggctaattttttgtatttttagtagagacggggtttcaccgtgttagccaggatggtctcgatctcctgaccttgttatccttccaccttggcctcccaaagtgctgggattacaggcgtgagtcactgtgcccagccaacacagtcgtttttctgaggagttcgcagaaggattcagacatctcagcagagtatgaccatgcccagtgaaagggcatgaagaagagggtaccttaggacaccagaagagggaacaccaaaaaagaaaaaaaaaggcaaatcaggatcacatactaaaggtaggtgattaagaatgaagggaagccgggtgcggtggctcacgcctgtaattccaacattttgggaagccaaggcgggcggatcacgaggtcaagagatcaagaccatcctgatcaatatggtgaaaccccgtctctactaaaaatacaaaaattagctgggtgtggtggcatggcctgtagtcccagctactcgggaggctgaggcaagagaattgcttgaactcaggaggcagaggttgcagtgagccgagatcgtgccactgcactccaacctggtgacagagtgagactctgtctcaaaaaaaaaaaaaaaagaatgaagggaaaattggaatatgcaccagaaggtcttaaatttgaggagcagattcaactctgcttgacatccacccaatcctgagaaacacagtcaggtatatcatagatgtgggttatgagaaaaagcaaaaatcttcttgactattaaatgttaggtctaagtatccaacttgctggtagtttagcttaacctcgacataaaatgtagaacgcataagagagcagactggctgcgtgttcgttggctttgccagtcaggtatggtacatgttgaacagcaggcagatactgcgacaggtagtgtgacagtggatgttgccagcacttctgcaaatggaagggaagatcatatttttcagcatgatctgtgtactacacactgccaaatgttatcttaacgctcccaactcatactagggatcaaatagagttatccccatatcatcaaaaagaacaaggttcagagcctgttcaaggggactcgcggaacagtctgaattctggtctacagcggtctaacttttctttctcttgtgaaaaagatccagtcctctgttcagaaactcccggaattatgtcctctgttctagcactgtcaaagatttagccatttcattaaacactttgtactgagcattactaacataatggtgaacaaactcagaacttaatgcccagtgtggtgtgtgtggcagagagcttatcgccctataatgtccattcttttcttctaccttttagtaagaagggctcttgctgccaggaaagtgactaacaaacatctggctagtataatataaacagaagcgatgggaacagcttctggttacatccttataaggaagtgacttgggttgcattaacccatcattaactcagggcagcctacattgaactcaacacaccttctcccagaagcaaagaccctggctatgtccttgaaaagtcataacttgtttaaaaaagaaggtgctacctgtcattttaactccatgctgcccttcccgggactagagagtgatgagctgatgatgaacctgttttggccttgtaaatggagacaacatcctagggaatgacaaagtaataaaacacaagaaaccaggatcgtgggcaacccttgcagcagagtttcctcaaccctcagatggtcatttgcctcacttgtgtgtgtgatctttatattgcttaagctatttatattttggtctgtgtgaaaggagccaaattcatatccaacttaatacagataaagagacagtcacaaaacagtgtgagaagggctgaaaagggataagaatagtcaccaagcgaagagcacagggtaggagcagctagtccataattggaattggaaggttctcccaagaatgcaatgtgtcagcggaatcctgaaggcaaagaagatgaaggaaggaggtaaatgacctgagcagagaacaaaggcctggataagggaggggctggtgtcagtgggaagaagcaggtggtctctcatgtttgtatgtaggttattgctgaaaacatgtccaagtagtatttactggaagatcttatttccaaaaggtaaaaatgttgtaaaatgccttattaccctaaaaagtataagtagatataacttaggtaaaagtatagtattctatactttgtatctgtcactattctagatctcactgtttgaactcaggaactgaacagatttggatacattttttggacaaatccctcactatttgaaattgcactactcaccttccaaagctgagaagccaaatagatttgggtgagatggtattgctcatgattcagactctaaccttatcacttttgctttggattatgagacttacgcttatcactattatcagcatttgtttttctttttctttctttttttttggtgacggagtctccctctgttgcccaggctggagtgtagtggcatgatctcggcacactgcaacctctgcctcccaggttcaagggattctcctgcctcagcctcccgagtagctaggattgcagccgcgtgccaccacacccggctgatttttgtatttttagtagagacgaggtttcaccatgttgaccaggcagatcttgaactcctggacttaagtgatccacccacctcagcctctcaaagtgctgggattacaggcgtgagcacctgtgcctggccaagggcaaggattctgtcagtcagtgtctctgtagcacccagcccggattctggcatgcaggaagcattgaataaagtgaagtgaatgaactgttcttcaacaacatgtttgtccaaattagactgctggggcacagctcctccaggtgagaatttttaatgtttgctcaccaggtaatagaagtttgactttgtcatatgagccagacacagtggctcatgcctgtaatcccaatgctttgggaggccgaggcaggcaaatcacctgaggtcaggagtttgagactagcctggtcaacatgaatccccatacctactacaaatacaaaaattagccaagcatggtggtgtgtgcctgtaatcccagctactcaggaggctgaggcagaaggattgcttgaacccaggaggcagaggttgctgtgagctgagatcatgccattgcactctagcctgggcaacaatagcgaaactctgtctcaaaaataaaaagaagtttgattttgtcatatgaaaaatgataaagacctgggtgcagtggctcatgcctgtaatcccaacactttgggagccaaggcaggtggatcacgtgagctcaggaattccagactagcctgggcaacatggtgaaaaaaccccgtttctacaaaaaatgcaaaaattagctgggtgtggttgtgactgcctgtagtcccagctacttgggaggctgaggtgggaggatcacttgagcacagaaggttgaggctgcagtgagccatgtttgtgccactgcactccagcctgggtgacaaagcaagacccaaaaaaataaaaacgataaagagacatgtcggccgggcgcggtggctggccaggtgcagtggctcacacctgaaatcccagcactttgggaggctgatgtgggcggatcacaaggtcaggagtttgagaccagcctgaccaacatggtgaaacctcgtctctactaaaagtacaaaaattagccgggtgtggtgttgcgcatctgtaatcccagctactcgggaggctgaggcaggagaatcacttgaacttgggaggtggaagttgcagtgagccgagatggtgccactgcactccagcctgggcaacacagcgagactccgtctcaaaaaaaaaaaaaagagagagacatgtgaatagctcaacgttccactcctacacacatataaatgaatatgcatacatatgttcaccaaaatagcagcataattcataatagatcaaaactagaaacaaaccaaatgttcatcagca

SEQ ID NO: 96161 - DNA, 17403 bp, Homo sapiens
agtgagccaagatcgtgccactgcactccagcttggacaacagagagagacttcatctaaaaaaaaaaatttgataaattggacttcaacaaaactgaaaaccttctcagtgcaaaagacactttaagacaatggaaagacaagctacaggctgaaataaaatatttgcaatatccaacaaggagttttgtattcagaatatataaagaactctcagccgggcgtggtggctcatgtctataatcctggcactttgggaggccgaagcgggcggatcacttcaggtcaggagtttgagactggcctggccagcatggtgaaaccccatctctactaaaaatacaaaaattagctgggcatggtggcgggcacctgtaattccagctaacttgggaggctgaggccggagaatcgcttgaaccctggaggcagaggttgcagcaagctgagactgtgccattgcactccagcctgggcgacaagagcgaaactccatctcaagagaaaaaaaaaaaaagagccctcacaactcaagtggaagaaaacaatccaattaaaactgggcaaaatacttgaacagacacttcaccaaagatgatatatagatggcaaataagaacatgtttattatcatcaaccattacataaatgcaaattaaaatcataatgaggatagcatggtggctcatgtctgtaatcccaacactctaggaggccaaggcgggaggatcacttgagcccaggagttcaagatcagcctgggcaataaagtgaaagctcgtatttacaaaacttttaaaaaaattagccaggagtggtggcacttgcttgtggtctcagctactcagggaggttcaggtagaagaatcgctggagcctgggaggttgaggctgcagtgagccgtgatcataccactgcactccagcttggtgacagaggagactctatctcaaaaaaacaaaaaaaaaaaagtaaaatcacaatgagatacctcttcatgcctattagaatggccaaaatcaaaagtgctgacaataccaattgctaatgaaaatgccacagcaattggaattctcatccattgctagtgggaaggcaaaatggtataatcaccttgaaaaacagtttggcagctttttatataaagttaaatatacaccttccatgtgatccggaaatcacacttgtggatatttcagagaaataaaaactaggttcacatggaaatctgcacatgaatgtttaaagcaatttcaatcatcaccaaaaattggaaataactcaaatgtccttcagctgatgaatggataaacaaattatgatacagccatacaacagaatactactagcaatgaaaagaatggactgtaaatacacatgataacttggatgaatctcaaactatgctgagtgaaagaaatccactcaaaagcttacatattgtatagactttatttatgtgacattcataaagaggcaaaagtgtattgacagggaacacatcagtgataaccaggagttaaaggtaaggggaggatgtggccataaagggatagcatatgggagatttgcagggtgatcaaactggtctatgtcctgattatagtggtgccacaaatctatacatattctagaattcacagaactgtatgcccaagagtctattttaatgtatgacaattacaaatttaaaatgagacagctggggccaggcgcagtggctcatgcctgtaattccagcactttgggaggccgagccgggtggatcacaatgtcaggagttcaagaaccgtctggccaagatggtgaaaccccttctctactaaaaatacaaaaattagccaggcgccgtggcgggcgctgtggaagtcgcctataatcccagctactcaggaggctgaggcaggagaatctcttgaacccgggaggcagaggttgcagtgagccgagatcgtgccactgcactccagcctgggtgacagagtgagactccatctcaaaaaaaaaaaaaaaaaaaaaaggccgggcacggcggctcatccctgtaatcccagcactttgggaggccgaggaggatggatcacaaggtcaggagattgagactatcctggctaacacagtgaaaccccgtctctactaaaaatacaaaaaattagccaggcgtggtggcgggcgcctgtagtcccagctactcgggaggctgaggcaggagaatggcgtgaacctgggaggtggagctggtagtgagccaagatcatgccactgcactccagcctaggcgacagagtgagactccatctcaaaaaaaaaaaaaaaaaaaagagacaggtggaactttgaacactgactagctatctgatgaaactaagtaattgttgttaattatttttacatgtgataatggtattatggttatttttaagtccttagcttttaaagatacacactaaaatatttaaggacaaagttataaaaaatatgggatttgcttaaaaataatactggaggaaggaacggactggggaagaaatgaaagaaaggtgaccatgatttaataattgttgaagagggtgatgggtacgtcgggctttattatactgttctgtctacttttgtatatgtttgatagtttccatactaaaaagttcagccaggcacggtggcttacgcctgtaatcccagcactttgggaggctgaggcaggcggatcacgaagttaggagtttgagaccagcctggccaacatggtgaaacctcgtctctactaaaagtacaaaaattagccggggatggtggcgcatgcctgtaatcccagctactcaggaggctgaggcagaagaatcacttgaacctgggaggcagaggttgcagtgagtcgagattgcgccactgcactccagcctgggtgacagagcaagactccgtctcaaaaaaaaaagaaaagttcaaaaagggtgtgaggttgttagttttcaacatcaagctgcctggtatgcagtctgagtttgccatttagtaggtgatcttgggcaagtgacttacttgtcctaaacttcagtttccccccactccataaaatgagactactaatgataatatctatctcacagttgttgtcaggattaaatggatgttgtcagaatacgtgaaaagcaatttacctagttcttgctatattgcacatgctcaataaatgttaatttttttgtcattattacatctcctggtctgattcctccatgccatctcctcagtatgagcaagtcttcctccaagcttctttctggatatcttatctaaaaagggccactgagttttacatcctaattcagaattataaaacacaggtttgaaattctacttccccctcacactacattatatatatatatttttttaaacagggtcttgctctattgcccaggctggagtgcagtggcgcaatcatggctcactgcagcgttgatctcccaggctcaagcaatacccccacctcagcctccttagtatctaggactacaggccagcgccatcgcacttggctaatttttgtatttttgtaaagacaggattttgccatgttgcccaggctggtctcaaactcctgggctcaagtgatccatcccgcctcccaaagtgatgggattacaggcgtgaacccagcctgttctattctttattgtatacccaggaggaaatcctaaacttaaaagattgggttaaataaaaattcagaaatgcctatcttttcctccaaactaggagtaatgtaagattaccatgagtcgtggtggagtggagttcaattcaccacagaatctgagacaggaagacctgccaggccatcagccccttcccaccactcctgcagcattcattttcaggagcaaaagagccttcccacaattactgagtccaacacttagtttccaggataagcccacacccaaccattctgtcctgtggttcccagtgatacactcacacttgttagaatgtgccactttggggttcagaaaatgcaatcactgagagaagcccgagttgtagttatgctctcctttcgttccatacttccccctctcttgccacatctatccactagagggaggaaggcctagaacctctttagccagagtggagcagtggcaaggatcagtagtgtggcttcttaaccaagccagcagtgggggtgtcagaagcaccggaacataatcgcctcattctctcggaacagaaaagaggaagggtcccttccttccccttttcaaccctctctgcatggattggcatgtcaccatgatctggtgcactcacttccctcaagtcagtgtgcaggctgcttaaaaaattcagaggaacatgtactggggtcttaggaacattttcagccagtggagaggaaaaggaaaactaagtatctcttggatcattcacagagttcaccaaatacaactgaaaactgggggctctaatgtccctgctgccctgatggtattagtttaagatgttgacactgacatctgcagagatctcatccatcacggtatatcaaagagcaaatgtcattctagttgagaaactcatgtatgagaaagaatggtcatcttgggaaatctgtagctccagcggctcctgatgttttttcctgcctcctcctgtcccatgcttgtgccccaggcagagctcattcctaaaaccatagctgaccctctgtgctgtcttttaagttataatagtagctgccaactgttgaatattttgctttatgacaggcactacactaagcacgttaacatatctcactgaagcctcacaccaaagctatgaactagatacaatctatctgtagataataatatatatccatctgtagatatccatcttatatccatctgtagatgaagaaactcaggttgagtaagctatctaaggtcacagagccaataagtgctagaggcaagattcttattctgtacactctgcctccaaagcccacttctttgaccctaagggcacaagaacccaaatcaggatgtgaagcttggtctttgaaaccaaaggaagctcctgaatcatcctgataggctgacggcttggcgctgtaaacaaaatcagtcttttgtcaaaaggaaatgaagttgccatgccactgttcactcctgtaagagactcctctgggctgttccattctcttgctgcaattcagccggttgaaaaactaaggtgactgcacaatgattaacttcaggcccttctgctctactttgagcctgtctctggttcatcgttacactctccgctcagcacccgcagactcaagagatttccaatcccccaatttagcgtggttctaccttaggcagaactcccatccagttcggatataagcgggtcgaagtggcagggaccacctcgctgggaggagaggctggagctgcggtcttaaaagatcttggggccgggcgcgatggctcacgcctgtaatcccaacacgttgggaggccgaagcgggtagattatttgagccctggagctcgagaccaccctgaccaacacggtgaaacccagtctgtactaaaaatacaaaaaaaaaattagccgggcgtggtggcgcacgccagtagtcccagatactcgggaggcggagccaggagaaccacttgaaactgggaggcggaggttgcagtaaccgagatcgcgccactgcactccagcctgggcgacagagcgaggctccgactcaaaaaaaaaaaaaaaagtattgaataagcaccggagaccctgagccaccgagtagcggagggaaagggtggcgcgcagaggggcccagccccgcctctgccggaccccgcccccaaaaggccccgccgccgccacctcctgctaggccccgcccccgacagacacccccccccccccccgccaggccccgcctcctgcccccccagccgcgaggtcctgcctcctgcccggccccgcccccggcctgccccgccctccgacccgccccgcggcgcattgtgggatctgtcggcttgtcaggtggtggaggaaaaggcgctccgtcatggggatccagacggtaagaccctcattcagtatcctccactgggggacccctccccatctggttctggccactcagctccggaccaggggctgtcgctgccgaccccgccccgcagggctctgggcccaccgtggatgctggggtcccgatcccgcacatccgggctcgggactccgccaggttacccctctgcccttggcatgcctccgcgctggagctcgggatcgccacccctgggacggtcaccacccaagccccgggctcttacccagcctggcggtcacgctgcctcctctacccacagagccccgtcctgctggcctccctgggggtggggctggtcactctgctcggcctggctgtgggctcctacttggttcggaggtcccgccggcctcaggtcactctcctggaccccartgaaaagtacctgctacgactgctagacaagacggtaagttggggaagaaagggccagggtgaaggaggggaccagagtgctcctggcatgkagggtacagcacccacggtggttgggatgtccaagggacgtggcagcgccaggcgcgcttggtgaaacacttgtgtcctccaccctccagactgtgagccacaacaccaagaggttccgctttgccctgcccaccgcccaccacactctggggctgcctgtgggtaaggaaagtgtggaatgggctcctttccctggtatcctcagaaggtgactcccctcctgggatctcatgaaacacgctgcttcaaccggtttgctccacacaccattccccttcccccacttggctctgcatcctccaagctgtgaggtgccactgggcccctctagagtgtggcttccatgacccccatccagctttaacactcaacagtcttgcctcttccctgcaggatttgctaattactccctctgagcaagcactactaactttttcccattgcccagacccttttggctcatctgtcaaggtcctggcagtaactggcaggaaacgctggaaataagtgtttcctcaactgggcgcttataagagatccaactgagggctcaatggggcaaatcttccctgccttgtagctccttgggaccacagcaggaagcaagacatcttgttctctcaaatctctttgagtattttgagggatgcagcacatcacagacaacccttatgtagctctctgcacggtccccaggcaaacatatctacctctccacccgaattgatggcagcctggtcatcaggccatacactcctgtcaccagtgatgaggatcaaggctatgtggatcttgtcatcaaggtaaggggctaggaagggacccaggggctgcttacccattctttctgggatttgtagaaatttctaagatttgcctgacagcaggaaatggtatgtactctgtggatgtgaagaaagtatgagctactcaggagactgaggcaggagactcacttgaacccaggaggcggaggttgcagtgagccaagattgcgccactgcactcaagcctgggcagcaagagcaaaactctgactcaaaaaaaaaaaagaaagaaagaaagtatgtagacggggaaaagatagcacatatctgatccctgccccagcctcagggaggtttagtcaacatggggctcagaaaccagtgacattccaaataaggtatttttctctctgtcttgtaaggtctacctgaagggtgtgcaycccaaatttcctgagggagggaagatgtctcagtacctggatagcctgaaggttggggatgtggtggagtttcgggggccaagcgggttgctcacttacactggaaaaggtaatgacctgtcttctccttgagcctgtctcccactttatcagttcccatagtcctcttggcacagtatggctgtgtgtacacatgtgtatgcacgtaagggccagggccgcccttccttctaaacatagcgctgatacaatagaaaggcatgtttctcagccccatttgccacaggaagcagttcctcctccacttgaattccctagccatggcagctgtggagattactaaagcaaacatgtgcccctcttccccaccttcaaaaatttgcccccctgggtgagctgtggagtgagccagagatagctttcagcccttcccatgggaacagctgggtgcattagcaagtccctggagctgctgtgtgccacttgggaaaatagattcacacctggctctgtgcctgtctccttcaccagggagtgacactttgccagaagcagctgatacaytgtgtggcgctgaactgactcacagatagccctggccccattgtccctcaastatattattgtcagggctggctcaactcaagcttccacccaagctccaggatcagatgtcatagcagctgctcaactggcctcaggcatattttcaactctgcatttgttttctaagttcgctgyattgactttattcttccactgctctcttcacctgacctctcagggcattttaacattcagcccaacaagaaatctccaccagaacccmgagtggcgaagaaactgggaatgattgccggcgggacaggtgcattacactgagggcctttctctcccaccattgttgactgttgccatgcaaattcctaggtgaccctctgaagrctggtwaccatagccaagctgttgttcatcaggggatttccagcaatgcttagaactccctagtatctgaaaaacaaaatcataagcaggtagaaaccaaaaaaaattttaactgatggaattagagaaacaaattaaatgagctttcctcattttgaatggatctaatagttttaggtgagagaagagagaagcagctaggaatgactagctaggaagaaagaaaattagcattggacactactgtgcattagacactgtgtagtctaatacactactatatattagacacaaaaattagacacatatataggtatctatgaagtaggtactagccttttccttttacagagagacaatggggttccagagaggctaaatgatttccacagggttatttcactggtaatggcctggagcaaaattagtatttggctctgcctagtgcctaagtacatgcacttaacctctgcaaatacagtgttctagaaccctcatcattgaatccggaggtacttgtagtcatttgtgacactggagtcctagcctccaaaggactttcagaagagtcttagattagttcctaagaaagatttctacaatatgaacttagatgaatttgaagggtgcccggaaatacagatgttggagaatatgcaggaagagtttagaggawgagaatgctaaaggaaaatggagtggagtggtgaatgagcagaatgaagatgaaagggctggtcagctaaggagccaggacagggcagagagtgtggccactacatttcactgtggggtatcttcatgcaggaatcaccccaatgctacagctgatccgggccatcctgaaagtccctgaagatccaacccagtgctttctgctttttgccaaccaggttggtttgttttcctccaycctaagacttcaaagttgctgtgtgggtagggctgagagacgtggtatggatgggcagaactggcccagtgccctgttttagcctctgcccaaggtcccctctgtaaggcacagggtcctctttcaataaggaggaaaaggacagagcactgaatcaaattccttccctggtccccaaggaaagaagaaaacttttaaggtatctagtctggagcacagaaacttagatcttcttggttaaatattcatctttgttccttcataatgtgtagataaaggctgttcccctcttctcctcatcctaactycctaaaagcactgcaagtcttgcttatttcctagaayttttgctttcccttaacattctttttcttagttggaaagttgtatagcagaaaactttttatgtgggcctgagaagactcctaaagactttccttcccctttgcatttcagacagaaaaggatatcatcttgcgggaggacttagaggaactgcaggcccgctatcccaatcgctttaagctctggttcactctggatcatcccccaaaaggtatccttcccatttctggacatcccactatcccctcatygtcaaaatcaaagccttgcccctttgtgaattctggcttcattgaaatcaaccttgcctcacactgccaactcggaagtctgagtgcacagacacagtgatctcctggtccctttcctttgggttcctgtttaccaggtgggtgacagggatggckgtgctgctaaggctcagcttgaggcaggctgagtataccyattcccagctgctgctaccacttgacactttctccagagcctttcagggccctccccagtctcatggcaccacacccccttgccagcatgtatctggagtattaagtactttcttctcyccatrcttcagattgggcctacagcaagggctttgtgactgccgacatgatccgggaacacctgcccgctccaggggatgatgtgytggtactgctttgtgggccacccccaatggtgcagctggcctgccatcccaacttggacaaactgggctactcacaaaagatgcgattcacctactgagcatcctccagcttccctggtgctgttcgctgcagttgttccccatcagtactcaagcactataagccttagattcctttcctcagagtttcaggttttttcagttacatctagagctgaaatctggatagtacctgcaggaacaatattcctgtagccatggaagagggccaaggctcagtcactccttggatggcctcctaaatctccccgtggcaacaggtccaggagaggcccatggagcagtctcttccatggagtaagaaggaagggagcatgtacgcttggtccaagattggctagttccttgatagcatcttactctcacctyctttgtgtctgtgatgaaaggaacagtctgtgcwatgggttttacttaaacttcactgttcaacctatgagcaaatctgtatgtgtgagtataagttgagcatagcatacttccagaggtggtcttatggagatggcaagaaaggaggaaatgatttcttcagatctcaaaggagtctgaaatatcatatttctgtgtgtgtctctctcagcccctgcccaggctagagggaaacagctactgataatcgaaaactgctgtttgtggcaggaacccctggctgtgcaaataaatggggctgaggcccctgtgtgatattgaaagggttgttgtgtctggggtccttgtttccaaatccccgaggacctagggaggaagggtttgccaccatgcaactctcccaggtgttccaaagaacctttgagaagttgtaccatgtgctgaaatgtgagctgccagcagactcagtgatcatctcagcagctgtctcagcagagccagagctccgcttctccctggaggctctcgaggtgggggaaggagaacacacattagaggggacatttttgagcccagctgcccctcacagtgttcccttgataggccactcttccccttcttccttctcttggcctatccttcaccatatttatccttcagggaacctggcacacaaatcaaagtgttgtctttctgtttggaagggaagccttcttctttaaaaagtaacctgacatcaccagccctggccggaattgttgatgcccagatagagttggcctcccccaggctcatctgtcctgagtacccttctcctctgctatgtagcatgacccaatctactccctttcccagggtaggactagggcagcctctccagattcttctttgttactcccattgcaacaaaacaatgtggtgggctcagaatgaaggtcgacattgcttttctgcttttcagcaactgtctattgctgtttctggggcttctgagagaaagatttgtgggaccctcagaattcactcctccccagggcagaaccttcagtaaattctgttggtggtgttccatccaacatttcttgatcagctaatatgtgtatggcactgggctctgtaacacagtctcagccacctcacctccaggaaggaaaatcttgcttaggaacgttgggctcagatagtgaagcaggcttgtaaagagaatttcctgcgtggaagatcaccattccttgtcttgcatgggtttttgtctcatccactcaacatacaaatgtttattaaggatctggcatgtgccaagcactatgcgaggccctgaggataaaagtgtgaccaacactggtcttagacccccaaagaactcacagtctaagacagacaaatgacatttttttttttttttttgagacggaggctcgctccgtcacccaggctggagtacagtggcgcaatctcggctcactgcaagctccgcctcctgggttcacaccattctcctgcctcagcctcccgagtagctgggactacaggcgcccgccaccacgcccggctaactttttgtatttttagtagagatggggtttcaccgtgttagccaggatggtctcgatctcctgacctcgtgatccgcccgcctcagcctcccaaagtgctgggattacaggcgtgagccactgcgcccggccaacaagtgacaaataattataacagtgtgactaataccatagcagaggtacatacaaagtgcagctgggaagaggttgagaaagattcagaaagggaggaaggggggaaagagaggtaacatttttgacagcctgggcaacatagtgagaccctatctctacaaaaataaaaaattaactgggcatggtggcacgaatctgtagcccagctacttgggaggctgagttgagaggatcccgtgaagcccaggagttcgaggctgcagtgagctatgatcttatgatcacaccactgtactccagcctaggtgacagattgagagcctgtccctaaaaatacaaacaaaaatggttttgagttaacagccatgtaccaagtactgtgctaagtactcgatctacatcacataatttaatccttatgataatcatgtgagctgaagattaataatttaccaaaggtcatacagctggtcagtggctgacagagcctaaatgtgaatttaggattgtctgaggccaaagtcaaacctagaagtgggcattgtaaactgctggcatcttgcagcagacaatgagaagggcagtccaacagaaggatcagcatgtgcaacagcctggaggaatgaaagagaagttcacttcagagaactagttcaccaaggcccaacatgccagagggaaaatggagaatgatgaggccttagaagttagagccagctcgcaaagagcctcgaaacactatgctgaagaaacctggactcaatcctgtggacagtgaaaagtttctgagggttttatacaaatggcaacacggtaatagctaacatttataaagcacttaccattggctaggcctcataataagagcctgcatgaattatctcactcaatcctgacaaagacccaatgaaatagtattattttattcccacttttcagatgaggtaattatcatttggaggggttcagtaatgtgctcaagatcatagactggcctgggacagaagcttggctctatgtgactccagagcccatgcttttaactaggaccaagagaattaaccccacgtccctgaagcacctatatcagattacaatgagtcactttctctgcctctagaatggcactagttgcacagtgagctatgatatgattgcaccactgcattccagcctaggtgacagtaagaacctgtccctaaaaaagaaaaattaaaaatttttttgagttaacagccatattgaggtactgtgccaagtactctatctacatcagatagtttaatccttatgataatcctgtgagttaaaggtttgctcacaagaggaagattgacattgcttttctgcttttcagcaactgtgtattgctgtatctggggctccagagcatggggctctagagtcacatagagccaagcttctgtccctggccagtctgtgaccttgagcatattagtgaacccctccaaatgatagttacctcatctgaaaagtgggaataaaataatactatttcattcttgggagaaatgagaaaatggccagaccctgaaatccccttctgtgttgtgtggttcagacaagggctgcactaccctatgtcgtctcgcgatctgcactctaggtgcctgtgggagcaggaactggggcacgggttcaccagcaagagtagttagaaacaattctgctctctgataagaaaataacaggaggcagactgaggtctagcccagggcctggcacatggtaggggctcaataaatagtttgtggaagggaaggaaggaccatgcggttgaagaagagattaagaagtgtttcagaggtgaaacgactagccttggggacagaggagatgagataaggtgtatggtagaaaattcagcattccctcccgacgttctgtctcattctctgaaatttcttctccatcacgcacttcaggctgcgataacgaggtggagtgtagaatccgacgaacgtcctctaccccggggcgggtggaggttacctggctgcggcggggaggtgggcaggcggcagggaaggcggggcagcagggcggggcccggggcgggaggtgtggccggcgggcgcgggcctgtgattgggactccgcgagagggcctaggattggagggcccaggcagagcccgcgaggaggtgacgcggctgcggaggtgacgcgggaggtcgcgcgccccttccggcgcggggagggcgctgaagatcggggccgctcggccgcaggccgcctccagcgccgcgggatgtagcgcgggggaccgcggcccccagcagagcccgcctgcccggctgtaagtctcccaggggctgcgcggtgggcagggactcggcgggagcgcggggaccccgggggccccgacccaggcctgcggaggagacagctgttgggggaacccgctccgacttgccagggggctcgggccccagccaaggagccgcctggcctccaggcatccagccggtcaggttgtaaacatttccggcccctcccactgcgcgccgcctccgaggcggcctaggtgcggtgggcgctcrtccccggctgtcccccgactcccggcagtcctgtgagtgctgcgcctttagccccacggggtggagatgcatgggttccccagatcgggaccagagagccagagttaagcctggccccgaggccgccgcgcgtggggagggagggctgcgggcctaggtcgcgaaccgcctctcagcggggaacagccgcattgggttgccaggaagccctaaggttcctccaccaacaatctttggcaggtcaagtcctgacagtgccctcactttgatggggtgggaagggaggttggtgatcgctctgcagggttaaggtaatcctgaaggctgaaatgcggggcagaatcgaaggtactttgggggaaaatgaaatttcattaccttaggtatctaggattgatgtattctatcttctgtttgagaattttggtcttcaagccttcgatttttaagaaaatagataagtgttttttttccctcagtttctggtgctctttgggagaatgggaaactgacaaggccaatttcagtttacaccgtttcagatgtcaaaggagcgctaggaggccatggtactttactagattaaccatagtacttccctcaagtgattcagaagacgggctagaaaatacagcggagaatacataggctgccatctacaaaacaaatgattgtaatggctggttcttttctgaaatgaagtaatagtggggtcggttcactgcttttctcttttcctagtagttgggtaggctacgatggtgcaacttcggttcctgaggttgtatactatctgtatactgccaggaatttagggtggtgctaaacagattgcaatgtcagggtaccggcttgcagctactaaatgtatttactccaggaataacttttatgtacccatattgtgatttgcacttgggaaatcagtcataaaaactgatgttacctgtgaaggcccatgttatggtagacctccgcaaaactatacctaattgtagagtagaaactgaaagctttctattctcaatggtcaagactttgcctgcaggtaggagagaatctcagaaaaataacagggagcaacattaatccactgatccccattgctgatttataaagtacaccaccttaagtaggcttttaggctattttcagttttttaagtctggcctcattttacctttccaggactctatggaaaaatgaattgtttactgccctggggactgtgttctttcatggcatgttcacaccatataccctcctggaatgccctgtttccatctctatctatcaatctcctgtcataaaatcttccacaaaactttttctgatcacttcaactaaagttgcacttttcttttgaattcctcctgcacataatggcactaagccttgtagtgatattaggaaagttatttcccccatttagaggccaacaaccatttcaaccctctgactcctctttgccttgtctctgtggccacaacaccatgcgtattgtaagtaatcaatcggtattctcagattaatgaaggttagaaattgcccttctttctaggccagtgtatttgttctctattcccataggaaatttcctttgacttctaatacaaagccaaactgaaaccctttaacactcctgctacattatcctgtcccatctacttattatcacacaggtaagataagcagtcgtctttatatctagacgctttgtgaattatggtgagttttttttcttggaccagtactcatcaacgttgttatgtccatttgtccctaatgtcacctcctggattttgttcctctcaccatgctaaaagttgattcccattttcctgctcagaaatgttgggggcataggccgggcacagtggctcatgcctctaatcccaacactttgggaggctgaggcgagtggatcacctgaggtcaggagttcgagaccaacctggtcaacatggcaaaaccctgtctctactaaaaatacaaaaattatccggatgtggtggcaggtgcctgtaatcccagctacttgggaggctgaggcaagagaattgcttg

SEQ ID NO: 96162 - DNA, 27215 bp, Homo sapiens
  misc_feature (1)...(27215): n = A,T,C or G
ctagtgatctgcccgcctcggcctcccaaagtgctgggattacagacgtgagccaccatgcccggccctgcccagctaatttttgtatttttagtagacatggggtttcaccatgttggccagactggtctcaaactcctgacctcaggtgatcctcctgcctctgtctcctaaagtgctgggattacaggtgtgagccacctcctttggccccgggcttacttatttatttatttttgtagagatggggtactttatatgttgtcaaggctagtctttgttttttttttttgttttgtttttgtttttgtttttgtttttgttttttttgagacagagtttcgctcttgttgcccaggctggagtgcaatgcgtgatcttggctcacaaactctgcctcccaggtccaagtgattctcctgcctcagcctcccgagtagctgggattacaggcatgcaccaccatgcctggataattttgtatttttagtagagacagggtttctccatgttgctcaagctagtttcgaactcccaacctcaggtgatccacccacctcggcctcccaaagtgctgggattacaggcatgagccactgcaaaggccttttaccctctcttttaatgcttttcattcctttttatccattcttcattttaggtagtttctgctgtcctttcttccaatttattacttgctcctcagtttagtctaacatagtattaaatctatcatttggttcttaattttggtcttttaatattttgggtctgtattattattatttttgagacagggtctcactcctgttgcccaggctggagttcagtggcataaacacagctcactgaagcctcaacctcttgggctcaagcgatcctcctgtgtcaacctccagagtagctcggactataggcatatgtcaccacacccaactaattttttaatttttggtagagataaggtctcactatgttgcctaagctggtctccaactcctgggctctagtgatcctcacctcagcctcccaaagttctgggattacagatgtgaggcaccaagcaggaccttagattttctatttattctactcccaggttgcccctaggagtgcagccttttgagatcctagcccaaaacacgaaggtggtttaccaaggttatcacctttggggacatttggactccttttttttttttttttttgagagtgagtttccccctattgcccaggctggagtgcagtggcgcaatctcggctcactacaacctctgcctcctgggttcaagtgattctcctgcctcagcctcccgagtagctgggcttacaggcatgcaccaccacgcctggctaatgtttgtatttttagtagagatggggggtctcaccatcttgtgcaggctggacttgaactcctgatctcatgatccatccatctcggcctcccaaagtgctggggttacaggcatgagcgaccgtgcctggccctttttcttttttttaatttaaaaaaattgaaatggggtctcgctctgttgcccaggctggtctgaaactcctaagctcaagccatcctcccgccttggcctcctaaagtgctgggattacaggtgtgagccaccacacccggcctggacttcaccggccccacacaacctattttctgccactaattccaaatcagcaaatgaccccagggtaaaatcagccctactgctgggcttacttctctactttcctgtactttcatgctgtcacaccaataatttctcactatcttatttttttaattattattattttttgagatgaagttttgctcgaaatggagtgaaatggtacgatctcagctcattgcaacctccgcctcctgtgttcaagcaattctgcctccgcctcccaagtagctgggattacaggcacctgccaccacgcccggctaatttttgtatttttagtagagacggggttttgccacgttggccaggctggtctcgaactcctgaccttaggtgatccacctgccttggcctcccaacgtgctaggactataggcgtaagccactgtgcctggcctcactatcttattagttcttttattattatttatttatttatttatttatttatttatttattgttttttttgagacagggtcttgctctgttgcccaggctggagtgcagtggtgtgatctcggctcactgcaatctctgcttctgggttcaagtgattcttgtgcctcagcctcccgagtagctgggattacaggtgtgcaccaccaagcccggctgtttttttttttttttttttgagacagagtttcactcttgctgcccaggctggagtgcagtggtgggatctcggctcactgcaacctcaaccccctgggttcaagcaattctgcctcagcctcccgagtagctgggattacaggcacctgccaccacgcttggctaattttttttttttttttgaagagacggagtcttgctctgtcacccaggctggagtgcagtggcgcgatctcggctcactgcaagctccgcctcccaggttcgagccattctcctgcctcagcctcctgaatagctggggctacaggcgcccgccactgtgcccagctaattttttgtatttttagtagagacagggtttcaccatgttagccaggatggtctcaatctcctgaccttgtgatccgcccatctcggcctcccaaaatgctgggattacaggcttgagccactgcgcccggcccagttcttttatttttatttttatttatttattgttttttgaaacagggtcttgctctgctgtccaggctggaatgcaggtgcgcaatcttggctcactgaaacctctgcctcctgggttcaagtgattcttgtgcctcagcctccctagtacctgggattacaggcatgcaccaccaagcccggccaattttttttttttctttgagacagagtttcactcttgttgcccaggctggagtgcaatggcatgatcttggctcaccgcaacctctgcctcccaggttcaagcgattctcctgcctcagcctcctgagtagctgggattacaggcatgcgccaccatgtccggctaatttttgtatttttagtagagacagggtttctccgtgttggtcaagctagtctcgaattctcaacctaaggtgatccacccgcctcggcctcccaaagtgctaggattacaggcatgagccaccgcacctggcctacacccagctaatttttgtatttttagtagagacggggtttcatcatgaaggccagactggtcttgaactcctggcctcaagtgatcagcccacttccgcctcccaaagtgctgggactacaggtatgagacaccatgcccagccagttctttgatttttaaagaagtatttcatccaacacttttagttgtctgtagctttagggctagttcaccattattgaaaggagctcaattactaaactatatttctagtccagtcatttcttctgagctccagctccactagtccgaggcctatcagacacttccacttgattatctataggcacctcacatccaataaactaaaagtatcatccttccaaaaccttcttcagcttctcagctaatgggatcaacatcacctagatctgttatttgtataatgtcctcacttcccaaagttcaactgattctacttacaaaacatctccccatctgcatctgctgtctacctctacaatctctggaatccgccatctccattacaggacaagaacattatgcctgtcacacaaaagctttcataatcttccctccactgccctcttccctgcctctcttcctcagtcatcctacatgcacacaccttacatcctagatcagggctgaaaacacaaactcctactacagccaggcaggtaatgcacctgagtgaagcagggtgcctaggaaccataatgaactagactcatttcaaggagataatggatacttgctctggttaattgctcatggagggatgcaggacaatatattgccagctcttccaatattttaaggaaagtcagaaatccaggttgggcctggtggctcacacatgttatccaggaattttgggaggccaatgcaagaggatcgcttgagcctaggagttcaagaccagcctgggcaacatagggagacctccatctttgaaggaaaaaaaaaaaaaagtcagaaatccaaatattcatgtaccatcttttttttttttttttttttgagacggagtcttgctctgttgcccaggctggagtgcagtggcgcaatctcggctcgttgcaacctctgtctcccggattcaagcaattctctacctcagcctcccaagtagctgggattacaggcggccgccaccatgtctggctaatttttgtatttttagtagagacggggtttcaccatcttggccaggctgatcttgaactcctgacctcatgatccacccaccctgacctcccaaagtgctgggattagaggcttgagccaccttgcccggccccatcttatgatatttaagtgtggggaattaaatacaatatacataaagagaatgcaagccaaagcatgcctgccatctcaagttggcctatcgaccacaatttgctctagataataagaatattcaagtctcctaaaattccatatataggaaatgtacttcaacattctgctctgtctacacagaatacctttctcatccttctatcctcttgaattatttcttttttggagattttctggccccaatccaagcagaatgaatagccctcatctgagtcctttagcaatttatccatgtctcccctgtagtgcttaatgcatgttgcattacggttatttgtcccaaatggagctcctcaaaggcacggactatatatattcatctttatgccctcggcacctagtgggtgcttaatgcaccgaaggttctctggaaatgtttgctgacctgaagtttggtgatcttatgtcctgcttaggcgcagcgttggagaggttggcgctgcaatgccgtcaataacccccgatgaccattagagggcacactgattccacagcagtctgcaccgggggcccagctgtcaagtgctccaaaacccactccccaatttacgcctccagtggtcatctcccacagccttcattttaacaaccctcaacacaaaacagtcattttcttggggcgtccctgaggtgtgaacctcctccctcccagacacccacccactctccccatcttcctacaatttgggcgctaaagatttaattcctctctgacaccagatcattttttcacagctaatctgcacagtctggaaggtggcagggagggaaagagagggagatcatagaaggaatgggtaacaagcactctgggctcaccttcaactttaacggactttccagaaacccgtcaccttccaccccacacccaaacacacacatccacgcactcactcagtttcctgccaggatcccaaaccagcacacctttccctcttcccccgaggagaccaggtaggaggcgagggaaaaggtggggcgcaagtgggccccggttgcttccacacacaccctccgttcagccgtcctttccatcccggcgagggcgcaccttcagagggtcctgtcctccaaagaggtaggcgtggggcggccgagaccggggaagatggtccacggggaagcgcgcgggctgggcggcggggaggaaggagttaaagatcctggattggctcttctgtcactgagtctgggaggggaagcggctgggagggagggttcggagcttggctcgggtcctccacggttccctccggatagccggagacttgggccggccggacgccccttctggcacactccctggggcaggcgctcacgcacgctacaaacacacactcctctttcctccctcgcgcgccctctctcatccttcttcacgaagcgctcactcgcaccctttctctctctctctctctctctaacacgcacgcacactcccagttgttcacactcgggtcctctccagcccgacgttctcctggcacccacctgctccgcggcgccctgcgcgcccccctcggtcgygccccttgcgctctcggcccagaccgtcgcagctacagggggcctcgagccccggggtgagcgtccccgtcccgctcctgctccttcccatagggacgcgcctgatgcctrsgaccggccgctgagcccaaggggaccgaggaggccatggtaggagcgctcgcctgctgcggtgcccgctgaggccatgcyggggccccggmgccccgctggctcccgcctgcgcctgctcctgctcctgctgctgccgccgctgctgctgctgctccggggcagccacgcgggcaacctgacggtagccgtggtactgccgctggccaatacctcgtacccctggtcgtgggcgcgcgtgggacccgccgtggagctggccctggcccaggtgaaggcgcgccccgacttgctgccgggctggacggtccgcacggtgctgggcagcagcgaaaacgcgctgggcgtctgctccgacaccgcagcgcccctggccgcggtggacctcaagtgggagcacaaccccgctgtgttcctgggccccggctgcgtgtacgccgccgccccagtggggcgcttcaccgcgcactggcgggtcccgctgctgaccgccggcgccccggcgctgggcttcggtgtcaaggacgagtatgcgctgaccacccgcgcggggcccagctacgccaagctgggggacttcgtggcggcgctgcaccgacggctgggctgggagcgccaagcgctcatgctctacgcctaccggccgggtgacgaagagcactgcttcttcctcgtggaggggctgttcatgcgggtccgcgaccgcctcaatattacggtggaccacctggagttcgccgaggacgacctcagccactacaccaggctgctgcggaccatgccgcgcaaaggccgaggtgagacgctggcacaccccgtcccgccgcttagccgcagggcctcccctctgacctgccggaggcatcgggactttctctctcatctgggggcactcttctttctcctcgccgttcttcattctactttcagctccctggccctttctacagctgagtttctatttccctctcttcttccgccacccccaccacgtctctatcctctcatctccccgacccccactcattccctcccaccctagcacagctcggttccggtccctttttccctcccacattttctctcttccctatagccttctcccttctttcatcctctcctctcattgcgcctcatcccctctcttctccccctccctctccctcctctctccctcctggccccatccttctccaccttcagctccactatccccctctccctacccgttccttcctcccttccgcctcccccttcctcctcccgcccaccgccccgcacccgcccgttccacccttcgactttctcctgctgtggcctaggctgagccgggagttaccacttaactctcactgggtctctcctgcaccctatctctaaacttcctcccttgggtgccccagctttcctactcctgtctctcccgcagtacctaggcttctctctctgactctccgtctttctccagttatctacatctgcagctcccctgatgccttcagaaccctcatgctcctggccctggaagctggcttgtgtggggaggactacgttttcttccacctggatatctttgggcaaagcctgcaaggtggacagggccctgctccccgcaggccctgggagagaggggatgggcaggatgtcagtgcccgccaggcctttcaggtgagtacctaggtttgaagcccaggctgtctcagcttgtggcacatcatttctgggcactgtgtccctcagcgtctgaaagaattccagaaaagaggtttttgtctgtttgtttctttatgcactcctggtaactcacagaacagaaaagaggttggtgatgctcactgggaattaggcaatgaagggcaggggactgcccaggggcgcttcgccaccagcaggctaaaaagataagaaaatgggcttgaggcgggaggaggataaagtcccacagcctggacaggacttggagaaggcatcccattggatcccctgctttggaatgggcatcacttcatgcagggcatagggtccagtttgaccttgagctaagcagagacgcagctctgggaggtgggctcccaactgttggggccccacagtactagggaatagtcagctcccaactctctgctctccactgacccctttctcaggctgccaaaatcattacatataaagacccagataatcccgagtacttggaattcctgaagcagttaaaacacctggcctatgagcagttcaacttcaccatggaggatggcctggtaagaaggggtcccgggaccctccagcgtggacctccagcccccactccatgaccctctgccagcctccatccttccctattcccagttctccccttccttccctcccttcccattgttccatgtttctcgtgatgatggaggaggacactggcaagttcagcctctgaaactcaggtcatcatcagtaatatggagacgatacatcctgccctgtctacctagtaggattcaggaagtgatgctaatccaaaggcatcgtttaaatagtaaaatctccctgtgatataggggtgttattttctcccatcctcttccaaaatcccagtgcctcttgttcccttccccacagctcccacctccatgcccttcatatgcccaccccagccgacctctgtttgcccctacaggtgaacaccatcccagcatccttccacgacgggctcctgctctatatccaggcagtgacggagactctggcacatgggggaactgttactgatggggagaacatcactcagcggatgtggaaccgaagctttcaaggtcagggcctggaggtggctggaatgggctgccttgggggatgaatcccaggtgcccagtgtcaagccatgagaagcctattgtcctgcagcagttacctatgcacaccagccttttcctccacagcttttttcaggcccatccctcagaagtcctacaaagtgtccaatctcaatcatccctgctgggcactgagttcttttacctttctttttcttttttcttttttttttgagatggagtctcgctctgtccccaagactggagtgtggtggtgcaatctcggctcacttcaacctccgcctcccaggttcaagcaattctcctgcctcagcctcctgagtagctgggattacaggtgccctccaccaacacttggctaattttttgtattttttttagtagagacagggtttcaccacgttggtcaggctggtcttgaactcctgacgtcaggtgatctgcccgcctcagcctcccaaagtgctgggattacaagcatgagccacagtgcccggccgttttaccatttactatcattctgtatacatgtatgtttggaaggcaaggcaaaaaagattagaggatgaagagatgaagtggggcacccctgaacttctattctctcaaacatagtcatcttcccccatgtcctcaggtgtgacaggatacctgaaaattgatagcagtggcgatcgggaaacagacttctccctctgggatatggatcccgagaatggtgccttcagggtaagtttgtgcacccagaagacagtgccaattccaaatgacatctcaccctcctacwtccccccsacagccctgccagggcacctgtttatcctgtagccattccaccatgcctggacacttacaagagccctggataaaacagacccagctccagtctggggaagccaccagaatgatagggactcacaggcatcacacttggggagccccatgcctgaggagggagcacaagcctgccctcggggagctccraagggaggcaggcaggaccgcctcccagcagagacagggctgtgaaagatgcacattacacagctctgcaagcgagcagggacaggarggcgctgaggccaatggccacaagggacaggtcatccagagaaggcctcctggaagacgggcacatggactgggcctgcgaatgtaggctaaggtgaacattaccttctcctgttttctaccaagaaaataagtagagaaaaatcaatgcttggttggtacttcaaccaagattataaactccctgagtgtagagatcgggttctaaatggagttttctttataaaccccttgatagttttcaggtgtttccacttgagtactatgtgtgtggtatgaggtcctgtgtccagttgcagtggggacttggtaagcaggtgacaacccagatatatatgtaggctctagaagcagagctggggtaggtgggaggtgagactgctgcactcacagcatgccttccccgcaggccctggcctagccaccactcctgctctcccttaggttgtactgaactacaatgggacttcccaagagctggtggctgtgtcggggcrcaaactgaactggcccctggggtaccctcctcctgacatccccaaatgtggctttgacaacgaagacccagcatgcaaccaaggtgactgccccttgccttccaggcctccatcccagagatgctgcatccttcccctaagcacagtcgagtaggtgctcctgycccatgctgagggctttctggagaatgactcctgcctttttcttcccttcatccatcatcccagttcactgatggactattagaaagttcttcctcctgctgtctaacccaaatctctcttgctgcaatatggactctctcctgcagatcacctttccaccctggaggtgctggctttggtgggcagcctctccttgctcggcattctgattgtctccttcttcatatacaggtgagctgtgatgtggggggttgagtgaggctgggggacccggagaaccaakagcagaggaggcggtggggacccagagggaagagggcaggggtgaaggggcagcaggggaaaaccaagggagatgaggaagaaaggaggcttaaaagccagaggagaaagaaagagaagggaatggcagggcgaggggaggagacaaggataggaatggccaaggagagtcagaaagatccaagaagcagagaagttgatgggtgacatcataggggcgtggactggttttccttgctactcttgcaggccagataggaagcaactttctgaacctttgcaatcatgcccatgttagctgaggagggtgagccctggtgtgtgccaggtgcccaacctagaatggagaagggagctgaatgagccttgttcctgccgtccagtggaggctaaaatgaagtacaggaggagttaatgatatacaaaagcaaggagggaggggagaaaaatcactgctggttgagcatataatgtgtgccaggcacttccacgtacactatttctttctttcttttttttttttttttttttttttgagacggagtctcgctctgttgccagactggagtgcagtggcatgatctaggctcactgcaacctccgcctcccagtttcaagcaattctcctgcctcagcctcccatgtagctgggactacaggcacatgccaccacgctcagctaatttttgtatttttagtagagacagggtttcaccatgttggccaggatggtctcgatctcttgacctcatgatccacccaccttggcctcccaaagtgctgggattacaggcatgagccactgtgcctggcctcatgttcactatttcttttcattcttataatagttaagaatgaaatagatattgcggcctcattcccaagtaaggacattgaggtgattcccccaaggtccccagtaaggcagaatttcccccagccatcctgattctcagtccagaggatagaattccccctccatctctgagtgcatggtgtggtcccacggctctgaggaggggctgctgagcaccctgccctgggtcagcggctcagccacaggctcagatgcagccttcgtatcccaggaagatgcagctggagaaggaactggcctcggagctgtggcgggtgcgctgggaggacgttgagcccagtagccttgagaggcacctgcggagtgcaggcagccggctgaccctgagcggggtaagaacgctggtgtttgtgttggggggcaataaaggagaggtgggtacaaggggcagtgcctgagggataggtaagggagcaggattctagtcccagctctgctttcacttgctgtgtgaccttgagcgactcatagtccctctccgagactgtctcagatgatgattacagcagcagagcctccctcacagggctcttttaaaggtcagaggagatagtacctgtgaaaacactttaaaaaaaaaaaaagtaaatgaggaggaaattttatgatgtggaacataaagcagggtgggccaggcacagtggctcacatctgcaatcccagcactttgggagaccgaggcaggaggattgcttgtgcctgggagttcaagaccagcctgggcaacagagcaagacatcgtctctacaaagaatacaaagattagcagggcatggtggcgcatacctgtagtcccagctactctggaggctgaggtgaaaggatcatctgagcccaggagtctgaggcggcagtgacctaggatagcaccactgcactccagcctggatgacacaatgatactacatctcaaaaaaaaacccaacaacaaaaaggaagggtgacacaaagataaggcwggataaggcagggaaataaagaccagagcacaagcaatcaggatgcagactgggcccaccggctgaccattcctcctgctctccctcctttcagagaggctccaattacggctccctgctaaccacagagggccagttccaagtctttgccaagacagcatattataaggtgggcctggggaaagatcactgggccttgggactggggcaggagtgtactctgatggaggactggtggggggttctgagggaaggagtaagctggtggggagcagcagatgggggccctgggrgtgggctattgggaacaagtgagggtcctgagggcagggatgggctgtcgggagcagctggaattcccaggacatgggaccatgctcttcacagtgacagtctccattccatgcccagggcaacctcgtggctgtgaaacgtgtgaaccgtaaacgcattgagctgacacgaaaagtcctgtttgaactgaagcatgtaatgtggggagtgaggcagtggcatggagaaggggccctcggggaygcaagggagactggccaacagaactagttatggagggacctcagggtaccccaagaaaggggcagggactggagccctgggatggaccttcatcttgtgggtgggagtgggggtatcctaagctaggagaagagaccactggagataacctggaggaatcttgaggggccatatgtgatgtccctgggggagagagggcttaggatgcagagggagtaggagcagattctggggagggtgggctaaaggacatgggtgggaatcaccagggaagatcttagtgatggttgcagaaagtgaataaggagttaagaagagtgagggtccctgaagctagtgagcagcttggtgaggagcgaggtctctgtcaagctcctgatgctggtcccacttgcagatgcgggatgtgcagaatgaacacctgaccaggtttgtgggagcctgcaccgacccccccaatatctgcatcctcacagagtactgtccccgtgggagcctgcaggtgagggggacaaggggtgtcaagaaacctgggttctagccctggctctgcccctgactggccataagaccccaggcatgcctcgccctctttctgacctttctggccccatctgtaaaaatgggagttggggaagggcagtggcactagagtcaatccaaagttttgtcctgttctaccagttcacatcagtaggaccctgcaccctcctccaactcccagggggatctgcaggggattggtctgactcttattgccccagcaggacattctggagaatgagagcatcaccctggactggatgttccggtactcactcaccaatgacatcgtcaaggtatgcccctaagcacctattggatgtgtagagcaggggccaggcatgcttctcctggccacgggtgtaggtcccactcctggccaatacctctgcccactcacatttccagggcatgctgtttctacacaatggggctatctgttcccatgggaacctcaagtcatccaactgcgtggtagatgggcgctttgtgctcaagatcaccgactatgggctggagagcttcagggacctggacccagagcaaggacacaccgtttatgccagtgagccttgactcttgaacctaacacctgcccccagcaccacccagtagggagactgatgcaaggcctctgatgggcttgggcatgcttgtcctgactccagcctcaattcattcacccatgaaaaagggaaggccagacgaagtggtttctaaggcctcctctagctctaacactctgtgatgcatccagatcagtttcggccacacccttgtttccccctcaccccttagctttgggctccctcactcggtgactaccgacctctgacccacagaaaagctgtggacggcccctgagctcctgcgaatggcttcaccccctgtgcggggctcccaggctggtgacgtatacagctttgggatcatccttcaggagattgccctgaggagtggggtcttccacgtggaaggtttggacctgagccccaaaggtgagaggagcacaccttccttaaacccagccacagtctcaacgaaccccagccccagggagagggtcccctggcagcaccaccacaccttccttctgtaatggggttcagtcaccaccctttgacccattgctgccagtgaccagtcccccgcccccatgccttggtcttggacttcccctgccatctcagctggttgccccagtctctcactaggcccttggccagccccacccctcagctcctctaccccccaatacagagatcatcgagcgggtgactcggggtgagcagccccccttccggccctccctggccctgcagagtcacctggaggagttggggctgctcatgcagcggtgctgggctgaggacccacaggagaggccaccattccagcagatccgcctgacgttgcgcaaatttaacaggtccctggtgtttgtcatggatcccccaggcccttcctccacagccaccatttacctaatgcttctggctctggcttatcccagcagtggcagagggagaccactcacctcctccctgtacatagtcagctccagctcagcacagcctcatgaccctcttcgcaagtacagcatgactcagctgtccccacagtcccctgccattcatgccccttccctccaccatcgacaccccacacccttcctgcccactcgccttgctggcctctagacttctcagcagtgtgtaggatagatgggcctcccgcctcctgccctgtaggctcttggccctccacgggagctcctgccccaccccttgatttcccttccccagcgtgcccaccaggcccagttcctccagacacacccttctgtggacatcactttgtccgcaattgacccttgtcattctccacctcctttacctccttctaactcactgggttcaacaaagatgaacaaaatgtccatatgtctgaagcttcatacttgaccttggggtctcagaaaagaattgaactttcttccttctgttttcccctgctccccggtatcctgctatgccctcaaccctgagcgtctctagagacctcactgcagtctggagggggaagtgcctaggggcgggcgctcacgtaggctgtgctgctcctctcttaccacccccaccgccaccctctgcccccagggagaacagcagcaacatcctggacaacctgctgtcccgcatggagcagtacgcgaacaatctggaggaactggtggaggagcggacccaggcatacctggaggagaagcgcaaggctgaggccctgctctaccagatcctgcctcagtgagtgcctgagtctggggaccccccccaacacaaagcccctgtcccgacccccaactctgatcctgcacctgccctgaccccttagctcagtggctgagcagctgaagcgtggggagacggtgcaggccgaagcctttgacagtgttaccatctacttcagtgacattgtgggtttcacagcgctgtcggcggagagcacacccatgcaggtaggccagggttcagccacaggtgccaggcaagctcagcatctggatcccaccagacctgccttctggttctgctttacccacctgaccccaggtggggtcccctacttcctgtctctcttagcttctcttcccttccaggtggtgaccctgctcaatgacctgtacacttgctttgatgctgtcatagacaactttgatgtgtacaaggtgagggtgggagtggggatgggaagggacagacagacatggacaaggtcagaaaaagatgaggggtaggcagaatgatgtggagtcttaagagaggagatyggggacacgggcagagacagtgacacagggagacccgggaacaggcagagaacccatgtgggatgggggatgagcaaagacagatgagggtacagaatgacagacgctgcacccggtgtgacggtgtggccggccgcacagttgcagccgtcaagtcctgcaccccctcgccactcccacaggtggagacaattggcgatgcctacatggtggtgtcagggctccctgtgcggaacgggcrgctacacgcctgcgaggtagcccgcatggccctggcactgctggatgctgtgcgctccttccgaatccgccaccggccccaggagcagctgcgcttgcgcattggcatccacacaggtaaggccactgaaggtgcaggcgggcatccagaggccaaggcttygcaagggaaacttgtcccctggcccagcccctcgccctttcatctctctctctctctctctctctctctctctctctctctgtctctctctctctctctctctctctctctctctcacacacacacacacacacacacacagagctgggacctcagatcctgcctcctgcctgtcttggattgtccacctacctcccttaacacccctccctccctcactcgctgatgggctctgctccttcccttgctcctcccaggacctgtgtgtgctggagtggtgggactgaagatgccccgttactgtctctttggggatacagtcaacacagcctcaagaatggagtctaatggggaaggtacagtgccccctcctagagggaatggggagggcagggtggctgagggaaatgccatcctggggcagcctgtgcctgcacagcccgtttcagctcctagccctttcgcctcccaagttccccttctcataatattaagagttcaacctgggctcatcaacttgactgtaaccagagactcaggttcctgctgcccctcttgtcaaacgatgtaaaagtatttccgggccagtgctggagagttcccagcaggaatctgattttaagaccctctgtgggccgggcgtggtgactcacacctgtratcccagcactttgggaagctgaggcaggcggatcacctgaggtcgggggttcgagaccagcctgaccaacatgatgaaatcccgtctctactaaaaatacaaaaaactagccaggtgtgatggcaggctcctgtaatcccagctacttgggaggctgaggcagaagaattgcttgaacccgggaggcagaggttgcgatgagccaagattacaccacgcaccccagcttgggcaataagagttaaactctgtctcaaaaaaaaaaaaaaaaaaaaaaaaaarrccctctgctccacctttgatgtggtaaagatggcttcagagccagcataagtgaggctgtgaatctcagctccacagctggctgtgtgtcagtttgctatacctctctgagccatggttttcctcatctgtaaaaagagggaaaaaatctatctcacaggaattatgtgagaaacccattaaaaatgtctaccacataattgtcatttaacttttccaagccttagcggattatctgtaaaatgatgtctatctcaggattgcaagaagcctagcacaaaccctggtacccagcaggcacctaataaattcttactcctacccgccccttgctcttgcctcctgtttatcttctatccttctgctgtattcgacacaattcaatgcagtaaacatttattgagtgactactgagtgccaggccctgggatagtaacatggcccagatccagagttagctgagaaattcatgtggaccccatctaaaccttatggtgaaagaaaggctgcttgggagccagtcctgggagcccagagggatctagttcggcaaatattccctgggcactatttgggggctgtcagagtacagccccttgttgagggtccagtcctcaaggagcacattcccagaaattgttcaacattctgggcgctgggggtgcttgtaatcccagcactttgggaggccgaggtgggcagatcacttgaggccaggagttggagactagcctggccaacatggtgaacctcctgtctctactaaaaatacaaaaaattagctgggcgtggtggcacgtgcccgtaatcccagctactcaggaggctgagacatgaaaatcacttgaacccaggaggtggatgttgcagtgagccgagactgcacccctgggcaacagagcgagactctgtctcaaaaaaaaaaaagagagaaagaaagaaaagaaaagaaagaaactgttaaacacaacaaggccactgtgattgatgcaaaccccagaagtagggacatgagttcagacagtggtcaaagagagggtgtggcaatattgggccccactccatcactgacctcctcagccacttgggcagatcaccctgggcctcagttcctcggccacaaaatgagggtatagcatgaaatcatgaaagcaacaatttacatagtgcttcctaggtagcacattccgtttgaatactttatggatgttaaatttaatcctcacaacaaggttttgagatgggtactgacactatcagcattttacagattaggaaaatgaagcagagagaatttattttacatacctaagcaagtatccaagctgaggttcatactgaggcagtgcaggatccaaagtgccagctcctaaccaccatgctgtgtagagccgggtgacactccagagagtgctgtccaacaggatgttccatagtcatgaaaatgttctgtattctgtgctgtccaatacagtagcctctaggcacatatggctacttatcactggaaatgtgacgggtgcaactgaggccctgattttttttttttttttggagacagagtttcgctctgtcgcccagcctggatggagtgcagtggtgcaatctcggctcactgcaacctccgcctcccaggttcaagcgattctcctgcctcagcctcccaagtagctggaattacaggtgagtgccaccacacacagctaatttttgtatttttagtagagacggggtttcgccatattggccaggatggtctcgaactcctggcctcaagtgatcctcctgcctcagcctcccaaagtgctgggattacaggtgtgagccacagcacccagcctgaatttttaactgtatttagtttaaattaatttaagttgaaacaggcacatgtgattagtggctactgtattggattacacagctccagagttctaaatgagaggctaatgtggtcacgcactacattcagggggtggggcccctctgagctagagggcttcctggcccaaaagagggagagagggtacctgtccacctgtccacccccacagtccctggtctcttttgcctctactttcctgctctcctctctcacattgctcaccttcccttctcccctgtcctacccagccctgaagatccacttgtcttctgagaccaaggctgtcctggaggagtttggtggtttcgagctggagcttcgaggggatgtagaaatgaaggtagagggagaagcctctgccctccccaccttttggggtcctagagggarttacccttctcaagcagccaatgccactcccatccctaaggctctcatctgactggggaaagggcatgtgccactccccagcccatcctcttttttccctccagggcaaaggcaaggttcggacctactggctccttggggagagggggagtagcacccgaggctgacctgcctcctctcctatccctccacacctccctaccctgtgccagaagcaacagaggtgccaggcctcagcctcacccacagcagccccatcgccaaaggatggaagtaatttgaatagctcaggtgtgctgaccccagtgaagacaccagataggacctctgagaggggactggcatggggggatctcagagcttacaggctgagccaagcccacggccatgcacagggacactcacacaggcacacgcacctgctctccacctggactcaggccgggctgggctgtggattcctgatcccctcccctccccatgctctcctccctcagccttgctaccctgtgacttactgggaggagaaagagtcacctgaaggggaacatgaaaagagactaggtgaagagagggcaggggagcccacatctggggctggcccacaatacctgctcccccgaccccctccacccagcagtagacacagtgcacaggggagaagaggggtggcgcagaagggttgggggcctgtatgccttgcttctaccatgagcagagacaattaaaatctttattccagtgacagtgtctcttcttgagggagagagggttgccagaaaacagtcagttctccactctctacttcaaataagactcacttcttgttctacaagggtctagaaggaaaagtaaaaaaaaaagactctcgattcttaagctgggaatgcaggctctgagagtagtaacagcctatgaattgcccagcagtgctgaaactggtttaaggacccatttacatccttaagaattattattattggccgggcacaggggctcatgcctgtaatcccagcactttgggaggctgaggtggatggatcacctgaggtcaagagttcaaaaccagcctggccaacatggtgaaacccagtctctactaaaaatacaaaaattagctgggtatggtggcacgcgcctgtaatcccagctactcaggagactgaggcaggagaatctctttttttttttttttttttgagacggagtctcgctccttcgcccaggctggagtgcagtggtgccatctcggcttactgcaagnnnnnnnnnnnnnnnnnnnnnnnnnnnnnnnnnnnnnnnnnnnnnnnnnnnnnnnnnnnnnnnnnnnnnnnnnnnnnnnnnnnnnnnnnnnnnnnnnnnnnnnnnnnnnnnnnnnnnnnnnnnnnnnnnnnnnnnnnnnnnnnnnnnnnnnnnnnnnnnnnnnnnnnnnnnnnnnnnnnnnnnnnnnnnnnnnnnnnnnnnnnnnnnnnnnnnnnnnnnnnnnnnnnnnnnnnnnnnnnnnnnnnnnnnnnnnnnnnnnnnnnnnnnnnnnnnnnnnnnnnnnnnnnnnnnnnnnnnnnnnnnnnnnnnnnnnnnnnnnnnnnnnnnnnnnnnnnnnnnnnnnnnnnnnnnnnnnnnnnnnnnnnnnnnnnnnnnnnnnnnnnnnnnnnnnnnnnnnnnnnnnnnnnnnnnnnnnnnnnnnnnnnnnnnnnnnnnnnnnnnnnnnnnnnnnnnnnnnnnnnnnnnnnnnnnnnnnnnnnnnnnnnnnnnnnnnnnnnnnnnnnnnnnnnnnnnnnnnnnnnnnnnnnnnnnnnnnnnnnnnnnnnnnnnnnnnnnnnnnnnnnnnnnnnnaaaaaaaaaaaaaaaaaaaaaaaaaaaaccaggcacactcttgtaatctcagtactttgggaggctgaggtgggcaaatcacatgagatgaggagttcgagaccagcctgaccaacatggagaaacccagtctctactaaaaatacaaaattagttgccagacgcggtggctcacacctgtaatcccagcactttgagaggctgaggcaggtggatcatgaggtcaggagttcgagaccatcctggccaatatagggaaaccccgtctttactaaaaatagaaaaattagccagatatggtggcacatgcctgtagtcccagctactcaggaggctgagggaggagaatcgcttgaacctgggaggcaaaggttgtggtgagctgaaattgcaccactgtactccagcctgggcaacagagcgagactctgtctcaaaaaaaaaaaaaaaaaatacagaattagccgggcatagcgatgcatgcctgtaatcccaggtactcaggtgactgaggcaggagaattgcttgaacccaggaggtggaggcttcagtgagccaagatctcaccactgcactccagcctgggccacagagcgagactatcttaaaaaaaaaaaaaaaggctaggtatagtggctcaaccctgtaatcccagcagcttgggaggccaaggtgggtggatcacaaggtcaggagtttgagatcagcgtggcctacatggtgaaaccccatctctactaaaaatacaataattagccaggcacggtggctcatgtctgtaatcccagcactttgggaggctaaggcgggtggatcacctgaggtcagaagttcgagaccagcctgaccaacatggagaaaccccatctctactaaaaatacaaaattagccaggtgtggtggtacatgcctgtaatcctagctactagggaggctgaggcaggagaatcacttgaacctgggaggcagaggttgcggtgagccgagatcgcgccattgcactccagcctgggcaacaagagtgaaannnnnnnnnnnnnnnnnnnnnnnnnnnnnnnnnnnnnnnnnnnnnnnnnnnnnnnnnnnnnnnnnnnnnnnnnnnnnnnnnnnnnnnnnnnnnnnnnnnnnnnnnnnnnnnnnnnnnnnnnnnnaactcaatcacacacacaaaaaagtattagggacctaaagagcttttgtttatgtggatatctattgatatttaccatagtagatattaaaacaaatccttatttatttattttttaatttttttttttttgagtcagagtcttgctctgtcacccaggctggagagcagtggcacgatctccgctcactgcaagctccacctcctgggttcaccccattctcctgcctcagcctcccgagtagctgggactacaggcgcccgccaccgtgcccggctaatttttttgtatttttagttgagacggggtttcaccatgttagctaggatggtctcgatctcctgatctcgtgatccgcccatctcagcctcccaaagtgctgggattacaggcgtgagccaccgcgcccagccacaaatccttatttatttatttatttatttattttttttttttttttttttttttgagacggagtctcgctctgtcgcccaggccggactgcggactgcagtggcgcaatctcggctcactgcaagctccgcttcccgggttcacgccattctcctgcctcagcctcctgagtagctgggactacaggcgcccgccaccgcgcccggctaattttttgtatttttagtagagacggggtttcaccttgttagccaggatggtctcgatctcctgacctcatgatccacccgcctcggcctcccaaagtgctgggattataggcgtgagccaccgtgcccggcccgacaaatccttatttattaactcatgtaagataacaataataagcctattacatgttaataattgttgactgctttatcaagaacattcttatgtgaaaccagccttttcagtgtgcagtggtgaagaatgcatgcaatactaattgggtgccactgccttgatttatgtaaagccacagcagttttacccccattgcttttgcacttcgatgcaatgtgtcaactctgtcaaaaaggcaaataacgtattagaattattatgaaaatcgtttgacctcatctatgccctgaaaaaatatttgggactcccaggatttgcggaccacaccttgagaactgttatgttactcaatggctggcatacagtaggaatcagataattagtatggactgaatggagaggcctgggagctggggaggaagtgggggtcgggtgggaacatatggatgcctttcaacccaggtgaaatttggggattgtccacgtgctcctccattccccatgtcagtgtagacaaatgttgagtcatagtttgcaaaatgcctctcagctgggccaggagccctggtttccctgctggacccacccctcacccctccttcccaggcaggcaggcaggcaggaatgcgggggagaggtggctgcagctccaccgccctcatgggggaggaaagtgccagacatttcttcaggaccatccatcaagtgcaggcaggcctctcccctgacctcccaggcctcttcctggagtccaccctgtgggacctggacgtagggtggccactgggagcttggaggtctggcgtggcactgctccctggtacacggctggcagtttgggataaagaaaggataaattgctcccctcctgtccagtgactcttgttttgtgcttcccgcccaccctttttggcaccagtcaggctcaatttatcgggagagggagcagacatggtccagtcctctcaccagccaagccggggatgaacagcactgggaaggcctaaccaagagtggttgtcctgtcaaccacagctactgaacttcctgatgggccccggtggccctgtagcctcccatgccccagttcctccccacaaggggagcagacagcccctgaagagactggctatgataaagagagctgtgaggcctaggaagttagatcagggtggagctgggacagctacggggacttgggctctggggagaggagccttaaatgaggtggggaagaggggcagggagtggacgactgaggagctccagaagcacaattctaggaaattgccggtcagatccttccgaggcagcctggctccactgcgggcaccgggaggggaaggggctgtgcggcggaggtgaggaggggcctaaggagtcgatgatttcagcggcccgagaactttcactggaactaaggagatttccttccggaggaaggcccctgaagccaggaagaactgggaaagccattcctaagggggcaccaggagggtagcaataaagccctccccacaggccggggagaccgtcttgtgccaggaacctccgcccacatgggaggggcagtctagcctctcagtttcccgggctgtcccgcctagtacgtttgggaggggtgagggccacagggtttccccagagtatggtaagaataacaataataattggcattcgattgtgccttgcagttgacaaaggctttcacatacattatctcatcagcccacgtaacgcccctggaagagtggggcgggctgagaaggcagctcagcaggcgggtggaagggccagctggaggctgtgcagagggaacccccgcccagccagccccgaacaaggccacggcctggaacaaaaatggagctgacagaaacagacaaataacctcctccctcacccgctcttttctctacgtcaaagggtttgagtcatttatcacagcagtatatttagtaataattatttttaaaaaagatttatacctttcaggacagatccgtggaatctaattaagcagagcccagttttgcagactgaaagtcaattttttaattaaattgcaggagctataaaaataaataaattaaccatttaaaaaaaaaaaaagaatgcggtccaggaagatttaatctctttgggttggaacgcaagtaagattccaggcgaggtgtttaccaccaagatgaagggtcgggatgcggatgaatttggtgttgcacaaagacaggagaggacgctctggaggaagatgagaccacgtcccatgcctgctcccagactgcattctaccaggaacaggggaggtggtggcaaaaacctgcttgactgtacctcaaaccatggttagagaagcagtgagagagtccagataggaaaagaccccagccatccacttccataccacatacactggcaccagtgagtcagaggataggctggttgccctttaagaacctttccaaagggaagattccataatcaggcatatctgctcatgacagtggcaccctgtctgaacttgatgcaatcatcccagtatgactatctgtctttggcttccaaatgtggactacatatggtatgccttggctattgcatgtccaatgatcaggtcagcccactaaacttcaggcagggaaaaactaggccaaaataccatgcagatctcagtgttcaaaactggcacaattacactcctctatcaaatgagaggcagtgcaaagttgggtaagaggctggactctggagatagcctgcctggatttagatcccagctctgtcactcataatcaatgtaaccttatgcaaactactcagcttctctctgccctgagttttctattctgtaactcaggaatgatcttaaaacctacttcataggtttgttttgagaattacatgacttaataattcctgttacatgctcagaacactggcaggtaataacaattaggtaagtgtttgttggtatgattaagagtcaacattatack

SEQ ID NO: 96163 - DNA, 19309 bp, Homo sapiens
  misc_feature (1)...(19309): n = A,T,C or G
gcactcaccgaggggattaggggtgtggtgtgagcgaggcggcggcactcaccgaggggattaggggtgtggtaggagcgaggcggcggcactcaccgaggggattaggggtgtggtgtgagcgaggcggccgcactcaccgagggcannnnnnnnnnnnnnnnnnnnnnnnnnnnnnnnnnnnnnnnnnnnnnnnnnnnnnnnnnnnnnnnnnnnnnnnnnnnnnnnnnnnnnnnnnnnnnnnnnnnnnnnnnnnnnnnnnnnnnnnnnnnnnnnnnnnnnnnnnnnnnnnnnnnnnnnnnnnnnnnnnnnnnnnnnnnnnnnnnnnnnnnnnnnnnnnnnnnnnnnnnnnnnnnnnnnnnnnnnnnnnnnnnnnnnnnnnnnnnnnnnnnnnnnnnnnnnnnnnnnnnnnnnnnnnnnnnnnnnnnnnnnnnnnnnnnnnnnnnnnnnnnnnnnnnnnnnnnnnnnnnnnnnnnnnnnnnnnnnnnnnnnnnnnnnnnnnnnnnnnnnnnnnnnnnnnnnnnnnnnnnnnnnnnnnnnnnnnnnnnnnnnnnnnnnnnnnnnnnnnnnnnnnnnnnnnnnnnnnnnnnnnnnnnnnnnnnnnnnnnnnnnnnnnnnnnnnnnnnnnnnnnnnnnnnnnnnnnnnnnnnnnnnnnnnnnnnnnnnnnnnnnnnnnnnnnnnnnnnnnnnnnnnnnnnnnnnnnnnnnnnnnnnnnnnnnnnnnnnnnnnnnnnnnnnnnnnnnnnnnnnnnnnnnnnnnnnnnnnnnnnnnnnnnnnnnnnnnnnnnnnnnnnnnnnnnnnnnnnnnnnnnnnnnnnnnnnnnnnnnnnnnnnnnnnnnnnnnnnnnnnnnnnnnnnnnnnnnnnnnnnnnnnnnnnnnnnnnnnnnnnnnnnnnnnnnnnnnnnnnnnnnnnnnnnnnnnnnnnnnnnnnnnnnnnnnnnnnnnnnnnnnnnnnnnnnnnnnnnnnnnnnnnnnnnnnnnnnnnnnnnnnnnnnnnnnnnnnnnnnnnnnnnnnnnnnnnnnnnnnnnnnnnnnnnnnnnnnnnnnnnnnnnnnnnnnnnnnnnnnnnnnnnnnnnnnnnnnnnnnnnnnnnnnnnnnnnnnnnnnnnnnnnnnnnnnnnnnnnnnnnnnnnnnnnnnnnnnnnnnnnnnnnnnnnnnnnnnnnnnnnnnnnnnnnnnnnnnnnnnnnnnnnnnnnnnnnnnnnnnnnnnnnnnnnnnnnnnnnnnnnnnnnnnnnnnnnnnnnnnnnnnnnnnnnnnnnnnnnnnnnnnnnnnnnnnnnnnnnnnnnnnnnnnnnnnnnnnnnnnnnnnnnnnnnnnnnnnnnnnnnnnnnnnnnnnnnnnnnnnnnnnnnnnnnnnnnnnnnnnnnnnnnnnnnnnnnnnnnnnnnnnnnnnnnnnnnnnnnnnnnnnnnnnnnnnnntgaggcctccgccctgggggagacccggatgccgcccccgccccctccccggcctggcccctaccttgtgcttgaggaagctgagccacatggcctggaaaaccctcctgtgctcctgcaacggggtccagactgcactcgccgccctccccaccccagaccagagcccgagcagctgccagggcaccccgaagcccagcctgagccaacacaagcctgctctccacttttctgaccctgccttccttcttcctgtccccattcaagtcaggtacgccttgccctcgaggctggagtctcagaacagccaagaaagcagctttggcaagaccatggccaagaggggggctgcgcccaaaacagcccacggggcccacaggtggcaccagaggcttgactccaagaggcggcggtggcctctgacccaagggagggtcccgagttcacaggtctcgtcacctcccacacttcgagtgacctggtggccgtgcaagctgccacctgtaccctgggagtttcctctggtgaggaaggcggcagcctccatggggtctcacatgcaccccacacacacccccaaacccgggagggtgcccggctctccagaagcaactcaccttcaggtgagcaaccttccaggtgtcccacagctctgcagggaaagcgagggcaaaggtcacctgacccgcaggggaggcagaccaaggctcagccctgtccgcccctgactctcagcacactcacccgcccgcttcacatagaagctggagacggtgggctcccggcggggcaggctcacggcagacagcagcgtgaaggcattgttccaaaaggcggggggcacctgcggagcctggcctgagtgcctggacgccgccccccagtccctgcctccctgggaggcaacagcatgatgctggcgacaggaccccatcacccacctcggggtgctggccagtgacccgggccacggcatccacggctgcctgcatggtgtggtagcgggtgtcgtcgtagtccaggtactcccggaactgggacaggagcaggctctggtcctcctcaggagacagcaggcctcccaccaccaactaggggcaaggaccagtgagcagccctgcccggcccagcatacgccagcaaggtccaggcaggcagccctgccccatcgagccccccaggcagactcctcctggttgggtgggccacaggagccacaggagtgtcccagccaacagccaggctcagctcagcaggccccgcccccactacggggccatcctgggatctggccagccagccaggccctctgggagtccccagcaaggccctcaccttgaagagctctcgggggaacaggtagttgccttcccacttggacttctccagggggtgcgctccttccagctgcacraacttcaggagtgcgctgagggccagctcctgggaagggggcagtgcagggtggctgtgatgccctcaccccacggatgggcccagagctcagcccagtcagggagcccctcccatctaggcccagagctgagaaaagggcggccgggccttctcttgctccacacgccaccagatgccactctgggcttccgtgtcccacccatgacgtagagatgacaagatctctagttaaagagatccagtgctcacgacagagtctggcgggggaagggtacacagcccaggtctgctttatgggccacctgactgctctctcgtcacctgtgtcacgggaatgccaccataacccttgggaacagctgtgaaaacacaggcgtgtgatgccagcatggtgcccaactcagacccaggcttggaagctctcatctcggggtggcaaactcagtgctttcagggcccaggcaaatgacaccacaaagcaaaagagcctcgtgcgggatgacaggagcacacggctgtctcagagctgtctctgactctccctccagccaatcgcagccatgaacaaacttagaccccgtgttgacagaactgattatttctttctgagaaggtggaaactggttattttcacgtggtatctccccaacatttaaaagtctgcagctcggctataattatagacagacgtgttggcgaggatgtggagtatggaactctcaaatgctgccagggggagggtaagatagcgcagctactatggaaaacagtcttgtagttcctcagaacattaaaaacacagctgctgtgtggccttgtaattccactgataaggcatattcaagcaaaagaaacatcacacaagagtttgtacgcgaacgttcacagtccgctgttcgtaacagccaaaggtggaaacgacgcaaatgcccagcaacctacgagcggctgaacgatacgtgctgtgctatacgacgcgctgctactcagccacaaagagaacgaacttcgaacacgccgatgagtggaaaaagccacataccgtatgatcccccttatgaggagcgtctaaaaaaagcaaacccattgatccaggaagtaaccactgatccaggagtggctgcctggggctgggggtggaaaggggcgggatatggaagcgatggtaactggtacaggatttcttttcggggcgataaagatgttctgggatagcggcaaccactgcacaacacagtaacagatgctaacttctcagctttaaacggtaaactgtgcctcagttattcctcactacagattttaagaaagctcataatgcattcccatggctgcagaccacagtgtgatctgagcaaacacatctgtggactggcacgaggcttggtgtgcgtgctctatgcaaacacagagatccccgtggatgccactggaaatgaacacggattctgcgtcttcaatattcactacaggactcgatagccatgtttctgaatgggactgaacacccacagggtgatgctcccatgaaggaagcagctttgcctggacaattgtgggagccccagacctctgctttgtggataacctgggagttggggtgcaggggatggacaaggatgaggccagcccaatgacccaccttgacctgaaaggaggggtggcccaggagctctcccaagcgattgcagcagctgtgatagcggtgtctcatccacaccttgtacttccgtgtggctccctgggaccctgcagacaggttagggtggtcagcccacgtgaggcccacatacgccaccctgggcccagcccaaaatctcaggcctggctccaccctcccattgtcttctactcagcctccgcaggtggaaacaggtcgctaaggcccccagacctgtgctgagaccagcacattccctgagccctgcaaacaggaagagcacctcctaccccaggactgccccagccaagctgccaggagcaggatccacatcccctctctttactccaagacctgacgtccccaggatggggacataaaggaagctccgagtttaagcgaccgtgtcaggatcagtcaacatcaaattacaaaaggggtgcaaagcacacaaaaagtcgtaccttgtccagtgttcatctacactcagctgcagggcacccatgtcacccctgccccaacgccaccatccatcttccacggtgggcttggtgcgtcctcccaccagcctgcacggcctgtgccagggttgggggcgctcatcccatggtgacaaagcctccctccgacccacggaaagagaagagcagccccggggccctccagggctcacctgtcatgaccatctcctcagagggcagctggcccacaaacagctctccccgctccagcaaggccccgaaaagacggctgcacgtgcggactgcttcctggatctcctcctggtcctcagactgcaggagaggcggcggcagggtgcccggccgccaactgtcaccttcgcccctgcctaggctgcccccaacccgttcccttccccctcgggacgccagccccgtcacccccgacccgtgacccacacgcctcccaccctgaccccccaacgccgtctcggaacctcctggggacctgccgccgcagccccccattcaagtcccgctcccgtgccgcgactccggccctgcgacgccgccaggcccacctgcagcacggccaggatgtcgaacacggcgttggcctcactgcggctcgccagcaccgcctccagccggcggcccagagcccggcgaactcccgcggcgcccggctcccgctccatgccgcccccaacacggaacaacgcggattctcagccgccggcgctcccgtgacgtcaccactgcgcgtagaacccgacgtcatctctacgcgccgtaccccaaccccatcttttgcgcggagcccgagtcgcaggcgtgccgccgacgtcatcgcagcgcgccacgcccgagtcccaggcgtgcggctggccatggcgctgttctacgtcgcgcggtacccgggccccgatgcggcagctgcggcggggccggagggcgcggaggccggggcgcacggcagggcccgcgcgctgctcgagcggctgcagagccgggcccgcgaacggcagcagcagcgggagcccgcgcagaccgaggcggctgcatcgaccgagccggcgaccaggaggcgacggcggccccggcggcggcggcgggtgaacgacgcggagccggggagcccggaggcgccgcagggaaagcgacggaaggcggacggcgaggacgcgggcgcaggtgggccgcggggcgagcgggctccctctggggcgccggcgactcggtgctgacgcgctgccgggtgggtgtctgcctcgcagaaagcaacgaggaggcgccaggggagcccagcgcagggagcagcgaggaggcgccaggggagcccagcgcagggagcagcgaggaggcgccgggggagcgcagcaccagcgccagcgccgaggcggccccagatggaccggccctggaggaggcggccggacccctggtccccggcctggtgctgggggggttcgggaagaggaaggcgccgaaggtgagcctcggcgggcgggagggtggtcggcgtgagagggtaggctgcgcggattcttaagtgcggcggtcgccccggaagatttcgttcagcgaatgttcccgggtcacagccgcgcctcgctgccaggtctgcagtttcatcgcctaggggtctggatcctgcacgtgcagagctcccgtttcctctgctaggcttgcccctgtcctcccgccgcgccgcgccagttctgcaagatgtgtttgcgtgaacgtgcggggtttcctgctgtgcgctcaccgcctcaggagtaagtcagaggccgttctgcaagctcctgaccgttggtgtttttgcttagcacgtgtggttttcggtaaagagatttccggcgagacaggtgaagaaagcgagaagtttgacagagtgctcgggcaccttaggtagggcaggtggaggaggttctctttgagttgggatgcaaagacttgaagccaggtcaaggttgggggttgggggtgccaggcagaggcctcgaggcagggacgccggcgtggctggggcaggcgagcgccaggtcacaggacctcctggctgcgggagggtgggtgccactgtgggttgatgggaggctacagagtgagtttgctcagggagtggcatctgcttttactgtttaacttcygaaggctgtatggaaagcgcatcytggggctgagaaggagctgaagacgacagaggtttccccagcctccctcccctagctttttccaccgtgggcttctgcgygagagcctggaaagcgctcacctggcctctctttctttttgatggcaggtccagcctttcctgccaaggtggctggctgagcctaactgtgtcagaaggaatgtcaycgaagacctggttcctatcgaggacatccctgacgtccatcctgacctgcagaagcagctgcgggcacacggcatctcgtcctactttccaggtgccccagccccgggcaggcagctgagggaacacctccctgggcacccacacacaaggctgtgagtggccgtgggtcaggcgtccctgccacatcggtgccaagtgtggtctcagcactctcaagctcatggttcccacttgggtctcctgaggctggcgttcctctgggccttggtgccatccctctggggagcggttcccaggcctccagcagagcagcccagcccagaggtcacaggcagggaagcggcaggcctaggcctaggcgtaaacacgacttctctctcgcctttcctcatccagtccaggcagctgtgattcctgccctcctggagagcgcagcctgtgggtttctggtgggcagaggtggctaccrgcctagcgacctctgtgtttctgccccaacaggcagtgggaagacactggccttcgtcatccctgtggtgcaggtctgtgtgagggtcccctttctctacagcgggtgtgcagaggacaggtaacagccttgctgacgcaggcgctycttccccctcaggccctgctttcgagagtggtctgccacatccgtgccctggttgtgctgcccaccaaggagctggcccrgcaggtatgtggaccctagacctggagcgtggcaccgcccgcctcagcttccctgctgagtgcacagcgatcagcccctgggggacccagattagatctggggtcctttttgctgcagtaggtggacaccagctacctccaggccagtgacagacttctcctgcaggtgagcaaagttttcaacatctacacagatgccacacctctgagagtctccctggttacgggacagaagtctctggycaaggagcaggagagcctcgtccagaaaacgtaggttgtgtcagggtgcgggtttttcagggggtccctgctcagccctgcaggtggcctgaggcaccgtgggagcagaggaggggccaccatctttaaccacctgttcccgtgaagaggaggagctcccacyggcccccttcccatgtggggtggagtcggggctgtggggtgaggcagcgtcttgctatccggaagcccttragaaagcttccttctctcgagctgctctctggtctgtagagctgatgggtaccgctgcttggctgacatcgtggtagccacccccggccgcctggtggaccacatcgaccagaccccaggattcagcctccagcagctccgcttcctggtaggtccccgccccaggggcctgggcttygagctcagggccgcgccacccagtcccgggctccctgtctcctgcagattatygacgaggctgaccggatgattgacagcatgcatcagtcctggctgccgcgggtggtggcggccgccttccagagcgaggaccccgcggacccctgtgccctgctccagcgaaggcaggcccaggctgtgacagccgccaggtatccagcagcacgcccaggtgctggcctcccctgagcagagtcctctgcacacagctctccttccttaatgcccagagataagggtggcttgagctctggtgcacagaaccgcatcgtactgtcacgtgagctggacccaccttgctcctggtctgcggcagtctctacagtgcgtagcatgaggaatcctgttccctggaggttcggggcagccactggtagggtgccagcaacacccccttctcttccagcacctgctgtccccagatgcccctgcagaagctgctcttctcagctactctgacccagaaccctgaaaagctgcagcagctgggcctccaccagccccggcttttctccacagggctagcacacaggggcctggaagatacagatggggacggggattcggggaagtatgcctttcctgttgggctcacggtgagtgggataccgtgtgggcagagggttgcactgggaacctggggcccctaaccaaccctcacctccaccccgaccccctgccgtccctgtagcaccactacgtgccctgcagcctcagctctaagccgctggtcgtcctgcacctggtcctggagatgggcttctcgagggttctctgcttcactaactcccgagagaactcccacaggtgaggccccggctgggcgggggtggcagaggtggcctctggtcccagcatcacttggcygcagccttctctctgcctaggctcttcctgctggtgcaagcttttgggggtgtggacgtggctgagttctcctcgcgctacgggcctggccagaggaggatgatcctgaagcagtttgaacaggggaagatccagctgtgagttcctgggcaggggcaaggcctctgtggggtgggggtgcccactccagggtcagcctggggctctctaaaaggtgcttccttctgcaaattggcttcctgtgccccagccccatggcagccagttcccagaaaggcctgagctgccccccgcagggccggtgctgccacggcccctgctcctggcacgtcgggcccacaatgctgcrtgtcccggcaggctcatcagcacggacgccaccgcgcgaggcatcgacgtgcagggtgtggagctggtggtgaactacgacgccccycagtacctgagaacctacgtgcaccggtgagcgctggcgcagcggccactgggrggtctggggctttgtgagctcctgggcgttgatgtgggaccgtcttgactggygtggggtggggttggtgtggagagaagctgtcgttccgtcagactcttgaaggctcaggggccagtctggagatagctgcgtttgattccagggttgggaggacagctcgcgctgggaaaactggacrggccttcacrctgctcctgaaagtgcaggtgaggctgcgagggtcttgggagtttctgctgttggtgggtgttaaggggctggcccaagaacccccttccaccatgagcttctctccaggagaggagattcctccgaatgctaactgaagctggggcacctgagttgcagcggcacgagctytccagcaagctgctgcagccgctggttcctcggtacgaggaggccctgtcccagctggaggagtctgtcaaggtaagggcaccagagtccggcatgaaaccctctggggagggcgtttgcagagagggcgtcgtcaccacacgtggagaaaagagggaaaaaraggaaagcgagaaggcaacagagggtcacacaggttgtcctcgagcttctggcccaagggcggggagcccctgggcaccagtggtggaaacacgtggcaccagggagggctgtcagcggggccagggcctggtttctgcatgcacagggcttcctgtcctcagggttccaggggcagagcccggggccccacagacgatgaggggacagagtgtgtggtgctgagccctcccctttcctccacaggaagagcgcaagcagagggcggcctaggctggggctcagagggccggagggactgaacgctcaccaccctgacyctccttccagagcagtgctgatcactrgatcctgtatgtgaggaaaggaatcccccagtggacacagccttcctccccaagcacgtggtctctgcgccaggcagcccgggcgtcagagctcaagcacctgccccgactggagacttcagggcttgtcactttcagagtgtggaggtcaggatggctgcgggcaatgaagccttagtaaaacggtgaaaagtactcccagacggacgcgggcacccgtcatgcttttgctgagagttgggggcattaaccttgagctaatgttaaaartcaagctcttggccaggcatggtggctcatgcctgtaattccagcactttgggaggccaaggcgggtggatcacctgaggtcasgagttcgagaccagcctgaccaacatggagaaaccctgtctctactaaaaatacaaaattagccaggcgtggtggtgcatgcctgtaatccagctacttgggaggctgaggcaggaaaatggcttgaacccgggaggtggaggttgcagtgagctgagattgcrccactgcactccagcctgggcaacaagagcaaaactccrtctcaaaaaaaaaaattgccgggcgcggtggcaaatgcctgtaatcccagcactttgggaggccgaggcaggtggatcacaaggtcaggagatagagaccatcattgctaacatggtgaaaccccgtctctactaaaaatacaaaaaaaaaaaaaaaacaactagcygggcgtggtggcgggcacctatagtcccagctactcgggaggctgaggcaggagaatggcgtgaacccgggaggcggagcttgcagtgagcggagactgcgccactgcactccagcctgggcaacagagtgagactccgtcaaaaaaaaagctctcctccccagatttgtgaaccttgtgactgttcagtggacacctcacatattgctggtgggaaggtcacgtggagacagctgggcaaagccttggggcgttaaacacagagtcactcatgacccagcacttcctctcctatgcaccttgtacaccccagatcaatgaaacctacatccacacagaaacgtacacaaatctctcagcagcactgttcacagtagccaaaaactagaaaccacatgtccgtcagctgatgaatggagaataaaacgtgggaaatccacaccaggagagaaaaaggagtgaggcaccagcataggcaccccgtggatgaacccggaacctgacgctaactgaaggaaggctccggctatagggagtgtcccaggcacagccagagattgaagggtgccggggccgggagttggtgggggttggggctggggacacagtggccagtgtgtgggtttgttttggggatgatgaaaatgttcttaggttgtgtgtggtgatggctgctcacctctataaaccttttactaaaaaccatggactgggtggatacagtgtgtgaattctctcagtccagtgctttgtttgaaaaaggtggatgatgccaacatcactaaccgccagggagacgcaggccacggccacacccggctcactggagttgtgaggatggaaacaccagcccaccccactcagttcagacctcagcttagatgcaaagaatgtctgggatggggactggcagctgattagagatgcaaccactgaacctgtggactgtgttcaaacaaatgccagcagaacacaaaaggcgactgttacaggaggcagaaagaaatgatttaggtagacggggtaaagccagtccccagcagaaaatttgccttttaacaaaaagcagctcaaaaatagctccctttctaacctcggggttcaaaatcacttctcacgacaagcagccagaaagagcagactgtgaatcacagatgagacagctcgggcacaggagtgcggggggtgtctcctgggtgatcaccaaacttcacacttccacaatgggccccagtaaaacagtggaccctaataagcacattccygtccccttaggtgcactaagggaagctaaaagcagactgaggggtgcctgtaaccccaagaagatgtctgggagcagacccagagaccctcgcagaaaagtgtcacagagcagcacagactgagtctgayagaaactctctatacaaatagcacaccttgtcccagctaaaaccctgggccctgggaggacaagacatccctcctctaacccctcgtcactagcccatttgtaaaaaccttgacaggccgggcacggtggctcacacctgtaatcccagcactttgggaggctgaggcaggcgcatcacctgaggtcaggagatcgagaccatcctggccaacatggtgaaaccccatctctactaaaaatacaaaacttagctgagcgtggtggcgtgtgcctggagtcccaactactcaagaggctgaggcaggagaatcacttgcccgggaggtggaggttgcagtgggccaagatcagcccactgcactgcagcctggcgacagaaaaaaaagaaaccttgacatctttactacaacttagcaacccgctcaggccccctctgcaacggagagctcttcttcctttttgcttattaaacttctgctccaaactcactgtgtgtgtgtgtgtctgtctgcgacctcgatctccttggccatgagaccaagaaccttggtatttaccccagaccacaaggctgcttcacgatgattgccatttatcggggattgatagtggctcagtgctgctgggttcgcagacataagatgtgggcctggccacacactcgggaggtgggaggagcgggcaccgtgggcacactcggggaggtgggaggagcgggcaccgtgggcacactcgggaggtgggaggagcgggcaccgtgggcacactcgggaggtgggaggtagcgggcaccgtgggcacactcggggaggtgggaggagcgggcaccgtgggcacactcggggaggtgggaggagcgggcaccgtgggcacactcgggaggtgggaggagcgggcaccgtgggcacactcgggaggtgggaggtagcgggcaccgtgggcacactcggggaggtgggaggagcgggcaccgtgggcacactcggggaggtgggaggagcgggcaccgtgggcacactcggggaggtgggaggagcgggcaccgtgggcacactcggggaggtgggaggagcgggcaccgtgggcacactcgggaggtgggagaagcgggcaccgtgggcacactcggggaggtgggaggagtgggcaccgtgggcacactcgggaggtgggaggagcgggcaccgtgggcacactcgggaggtgggaggagcgggcaccgtgggcacactcggggaggtaggaggagtgggcaccggggcatctgcagtgcattgggcaggcccgtcccggcccttccacagtggcacgggggcctggatccttccccagagtttcgagatgtgagaggggagaggagcgggagggacagcagytgagcacacaaaggaagaggtgggaggggcaagaggaggacagagctgttggtgacggtggggaccaggcgagagggggtggggtgggggctgaggggtgtgccggggccatgccggcggcaggatggtgggcactcacctgctgggccaccagctgctgagggctcaggcaggcgtccgtggctgggcctcgagggctctttgcgaccttcacggagcacagaatagggaggagggaccttcaatgtgcagtgtgggcctgagctgtccacacattcccgtctccttacctctacggaggaagggggtaggtcttgaaagtaggataatgacagcaaggagcacagcagccactggcctgaccccgtgtggccatgtgggaggggcacagtgtgagctgcccctacctgcatgtaggcctgcactggcgcggtccccgtggccttgggaacctgagacatgggggatggcagaaacagtgctttcctggtgggccgcggacggtgggccacggaggctaggccactctcctggcgggctgcagtggtaggctgctcttggctgttggccggttggctgctaggcctgaactgtgacttgctgggtattcatctatgaactcaaaggacaggccttagagaaagagctggaagacggcagagccatggaggggcggccaacccctccttcacctttccagacatgagtgttgcgcatggccctgtgcattctagttgctgagagactctagggcgagtcggacgggtctggccctccaggagcgaggtctgcactgtcaggaaggcagagcaaggctggccgcaagtggctcatgcctgtaatcccagcactttgggagaccgaggcaggtggatcacttgaggtcaggagttcgagaccagcttggccaacatgctgaaaccccatgtctactaaaaatacaaaaattagctaggtgtggtggcagatgcctgtaatcccagctactccggagcctgaggtgggagaattgcttgaacctgggaggtggagattgcagtgagccaagattgcaccactgtactcccgcctgggtgacagaacgagactctgtctcaaaaaaaaaaaacaaaaaaggaaggcagagtgagtccacctgccaggtaacaggcagggtcccgggtctggaaggcccacagccacccccactcaaactgtcatagccccccccatcagccccggctccaaggagatggtccttgtcactgggtagatgcaaacttgggcaatcaagaggtggacccacaggctcagctgggcccggtctccgcaggaggagcccccgtcaggcgggggggaggggggcagaaccacccccacactccgcccaggtcagggtggcagccacgtctctggagggtggcacaaggccctcccttgccaatgacactgatggcgtccacatcattgtggggaggcgtgggaaataaaaagaaaccactgtacgggtggcagcgacgagccgcacccgaaggcgctcccccgtgggccccgctgcgctcctggacctcatcctcccgtggctgaggaaggaggcgcatccaggctcccccacctgcgtcccagcctcagctctgctacggagaggccgccaggccggggcaggcagcacagtggcccacacccctagctcctccagcgtccccgcccctggcagccccattgccggccagggtctggcgtctctgagccaggtggcccggcttcctggaagggccacgccagttgcaccaagatccagagaagtcagcccaggctccacgcagcggtttggcacatcccacgaggcgtccttactgcagtccagccctccccacggctcctgctcccaggggctgcgccgggcaggggtgggaggcaacaccaggcgcccactccaggaaggcctgggggttgcggggctcatggaaggcatccgggggtggcggctgctctgggctgcggccctgggggagcagctcccctggaccacacctggagactctaccatcagcaaaaatgacagggaaaaggcctctgtaccactgtcctgtgactgggcagaaaaggaggtcttgctcccgctcaaggaaccttctaaaatgcacctgctgctgctcgcagttctcttcttggtggggcctacagctcctggtccaggtcacagcgcttcccatcaggtgggagagaatcaccgcccaccaagcccatagctctggggccagcaggcaaaaggggaaagccctgctcatattccgaaccagtggcttttgaacaccatgtgcctcctgttcaaaactgtgccttgggctatgagaacagagcccgcagggactaccatgcaagtcaggaaactgcttccgaggagcccgaccctccgtgggcggccactccccgcctcctcgcctcaatgccacacaaccaagctgctctttaacaacccacgttccacaacgctccttattctggttttgtatttccattccgttctcccgcagacttagtcctaatgtattttatgcttggaatcctttgacagctcccacagacttctgtgcaacagaaatgtgtacgaaaattgatcacaaggctctaggcgttcaaaaacaatgatcccgactgagagatcattacaattagtattggtatgcaaatagtcaacataacataagcatattacaaactatggtaataactaaatacaaaaagtgaaatttaaccccagtgagatggatcaggctgtaaactgcccgattctgtcgctgttcagggcgccacgtgtaaccaccctcaatccctggtggactgaacaaagggggcgaacgtgggaataaaagacaagagacaagagagtatatttgaaagaaggggtcagggggcaccttgcctctagtggacaagggccctgagctttacacagccctccatatttattggtaaaagagatagagctttacacagccctccgtatttattggtaaaagagatcgcgacaaagtgcagtgattgtcgggtaatcggcagtccgccgtttggttcacagcaggcttgcgagactgcatccttcgaacaacaggcgctagatttcccagtagataacttcaaggaccccagtgccagggagtgaccgccctcagcaaaccttctggcagcaggcgcagctgtgagttttactcacatcctacattcaggataaacagtttgctgattgatcatatagcctccagtggaatgctgagttggtcacgatcccttcggcctttttggctcccagtatcaggctatttttttttcaaccagttcatccattcatgggatgacatagattcagcaccggtgctgttcttatttttcgtatttatagatcaaaacaccgaggaaaacccgcgcctgtaattaagcagatggcaccaggagttctgccgcttgactctgagcccttctgaagacttcatcagccggagcttgacaggttctccttcacatgtggctgaagccaaaagagaagcctcccggcctgcaggcagcttcgtgggtggcacgtgggggcggcctcctcagccttgatggcgggctgtcctctggcagagccctcaccaggcagcagctgacgaggagacccggatgatgacggaagctctggagacgttcctaaggcctcgtgactgtgtttggaaggtgtttgcatctgtgcagctcagcgtgaggggcagataggctgagccacaccctggcagcctggggtggtcgtctgattcttgctgtcctcaagctcacactccagtctcaccatgcatggctcccagcccccttcttggccctggggggaccctccagggatcatcaccgccaactcttcagtacaccctctgtcccctgagctttgctttccacatcgagggccatttgcctgcttaaggtgagtttgtttgtggtaaatgttttcagtttttgtctgagtatgtctttgttttcactcttatccttgaaagacagttttatcccagcactttaaagctacttctggtttccacagttcctactaagaagggagctgtccatggaatcgcctttccttcgtgagaaatctgttttcctcctggattctttcatggttttctcatctgctttgagtgccacagtttgcccagatgtgtcaggcacaggtatctttgtctgtatcctgctagggacttgttgtatttcttcagtctttagactggtaaattaaacccattctggaaaattctcagccatccactctttgaatattttcttttttcattctcttctggaactcagttgaatgtgagatcttctcacccctccctcttcttttcttattttttttgcagagacggggcctcactctgttgctcagactggtcttgaactgcttggctcaaacaatccacccacactggcctcccaaagtgctggggttacaggcctgagcactgcagccagcctgtcttctttgtcttgtttgctagtctcatgctatcatgattatttctccagatcnnnnnnnnnnnnnnnnnnnntgtagctcgcaaattctctaatgtattgtttaacccttccattaacttttttaaaactgcagtataggctgggcacggtggctcacgcctgtaatcccagcactttgggaggccgaggcgggcagatcacaaggtcaggagatcgagaccaccctggctaacatggtgaaaccttgtctctattaaaaatacaaaaaaattagccaggcatggtggtggacacctgtggtcccagctacttgggaggctgaggcaagaaaatgatgtgaacctgggaggcggagcttgcagtgagccaatatc

SEQ ID NO: 96164 - DNA, 25824 bp, Homo sapiens
tgcgccactgcactccagcctgggcgacagagtgagactctgtctcaaaaaacaaaaaaaacaaaaaaaaacaaatgtcagccagcataccctgtctcccccaaatttcttagcctggcatttaaggctaaagattaaccagactcaccatgtattttcctgcccctgtgcattttattcatgctttgttctctgctttctcagcccctgatctttaccaattaaaatcctcttctagctgcagctcagatgctacctcttccaggaagccttttttggtatccttacccaaatgccctctctcctctgaatggcagagcacttttctctacctcttttgcagtagttacattctcttatgcattctgactattaagggcgaggctgtcagtttcctccactaaatacgaaagtcttcgaaggcttataagtttgttgtattcatttttgtatccccaatacctagcacagtccctttacatagcaggcatttaattcaaaatatatttgttaaacaaataaatgtatgtgttgggttatggagataaatgagaaacttgtggggtttttttgtttgttttctgagatggagtcttgctctgtcacccaggctggagtgcagtagcgcaatattggctcactgcaacttccgcctcctgagttcaagcaattctcctgcctcggcctcccgagtagctgggattacaggtgcctgccaccgcacccggcaaatttttgtgtttttagtagagacaaggtttcaccatgttgtccagtttgtctcgaactcctgacctcgtgatccgccagcctcggcctcccaaagtgttgggattacaggggtgagccaccgtgcccagcctttttgttgttgttgttgtttgtttttgagacagggtttcactctgtctcccaggcaggagtgcagtggagcgatcatagctcactgcagcctcaaccttctggactcaagcaattctgccaccctagtctcccgagtagctgggactacaggcacacgccaccatgcccagctaattttttttttctcgtagagatgaggtcttgttattttgcctaggctgctctcaaactcctgggctaaagcgatcctcctgcctcagcctcccaaagtgctggtattagaaggatgagccactgtgcccggtgctaggaaaacttcttgccctgtgctaggaaaacattttttcctagtggaaagaaagtttcccagtggaaaaaaagtttatttgcactaggagcttacagttcagtgacagagacatatacaaatatgaattaatttatttgggaggctgaggtaggcagatggcttgggcccaggagttcaagacgaggctggacaacatggagaaaccccgtctctactaaaaatataaaaattagccgggcattgtggtgcacacttatagttacagctactcaggaggctgaggtgggaggatcacctgagcctgggatgtggaggttgcatacagtgagctgagattgcactgggtcacagagggagaccctgtctcaaaaaaaaggaatatattgagtgctggttatgtggggctcaggtgggtagggatgatggcaaaggagagggcactcagagtgaaggaactccctaggtggaaggcttgaggtgagagagtacatggcacatttggagaatgtggtgcgtagccctgggactggtacataggaagcatgaaggaaaatagataaaaccagagaggggatgtgggcgctggatcacaggggtttggctgtgtctttccaaagtgtttggactttattcttgaggcaatgaggggccaccgaatgctcttaaggaggcgtataataaatacaagatgaaggaatgactcagcactatgttttggatggacagcatcctgcagccagggccattttaggaaaatcttacagtgggtgctaagcagcatctattctctgaggccagcttgtcccttggttaaaccacctctttatgggattttccctttaaaaaaattttactgatacataatagttgtacatatgcatgaggtacatgtgacattttgatacaagcataaaatgtataatgatcaaatctggggaactggtatatccatcacctcaaatatttgtgatttctttgtgttgggcacattctgaatcttctagctattttgaaatatacaataagttattaactatactcgccctatctaactgtatttttgcacccattaaccaatccctcttcatccttcatccccactatcctccccaacttgtggtaaccaccattctattcactacctccataagaccaaattttttagttcccacatgagtgagaacatgcgatgtttgcctttctgtgccagtttatttcacttaacataatgacctccagttccatccatgttgctgcaaatgacaggatttcattctgaaatagctgaatagtatttcactgggtatatacagcacatttttttcttctttttttaaatttttttttttgagacagggtcttgctctggattgcagtggtgacatcacagttcactgcagcctggacctccctgggtcaggtgatcctcccacctcaacctcctgggtagatgggactacaggcatttaccaccatcctcagctaatttttttttttgtattttttgtagatatgggggttcaccatgttgcccaggctggtcttgaactcctgggctcaatctgcctgcctcagccttccaaagtgctgggattacaggcatgagccaccatgtccagcccctctgcttcctgggttcaagcaattctcctgcttcagcctcccaagtagctggggattacaggcatgtaccaccacgcccggctaatttttttatttagtagagatggggtttcatcatgttggtcaggccggtcttgaactcctgacctcaggtaatccgcccacctcggcctcccaaagtgctgggattagaggcatgagccactgcacctggccaacacattttctttatcatccatccattgatgacacttagattgagttcatccatacttcagctattgtgaatagtgctgcaatagtcatgggagtgcagatatctgtttgatatactgatttcgtttcttttggatatatactcagattgctggatcatatggaagttgcagttttagttttttgaggggtctccatactgttttccatagtgactgtgctaggggttttcccttttgaagaggccacatccaaagaacacttggtcagattaagaattctgttctgtcccctgaaagtgttttctgacctgttccaagggttccacattcttctctggctttagtacagaagttctactgtttggattgtattagtcagggttctatattagtcagggttctccagagaaacagaaccaatggaagaatatatataaagagatttatgaggaggaatttacttatgtgtttatgcaggcagagaagtcccatgatcttgccatctgcaagctggagactcaggaaagctggtggtataaattccagttcgagcccaaaggcctgagaatcaggagagccaagggtctaagtcccagtctaagggcagaataccaaggtctcagcagatacacccattggcacccacagcctcttctgagcctgggactggtttgggccccctagataatttcttgccctttgtatggagtgatgtgggacaacatcctataatagagagaaaatcataggctttggggttagtcagcactgggttaaagtctcagccaaaatcacttactagctgcactaccttagcaaagtcacttacctttctgagccttggtttccatatctgaaaaatggggataattatgcctactccaaaggatgagtatggggattacctagctggctgccagcaccatagcaggtgctcagtaaatggtatttgttttattcatatttgtggagtcaaatactggctgttgttctgcctaagaagcctgaagctgtgcttggagcaagctgttgctaggtatcataaattaggggaatgaagactctacctagtttatcttcacaggtcatctcagagtgccccaacccaagcctttcaggtgaaaattcttcgtctccccagccaacttcagctctctgccttctgcacacctcttcccagcagcagtggtcacatttggtaggcaggcaggggcccagccctgactgagaacactgttgcaaagactgagaaaccggaaaacactgtggcaatctgccctgccctgaggtactctgaagaatcagtggcccacccctaaactttccagctgtgtgtttgaggtgagagccccatttcagaacctagagtgatcttagaatctagagtgatgggaaaactgttagaacatgcaagcatgccctgctattttttttttttttttttgagacagggtctcactatgctgcccaggctagtctcgaactcctggcctcaagcagtcctcccacctcaaccacattggtgctgggattacaggcatgagtcactgcacctggccccttgtgctattttggagctgaggttagagttttccgtcaaaaccaagaaactcagttatggatctatctcaaagctgcactgggctgctgctgtaggttcagggagtaagtaaagccatccacccctttgggctgaaagttccagccctctaattccctaatcatttggtctttcccatgactggctccttcctgaggctatctaagactcctcattcattaacattaagtcagggaaaaaggctctttataaataacaaaagacattcctatcagaaaattcaggaaattttggcatactcaagggcttaccaaatatatttcataatataccccacagtggggaagtattggtacaaattaaagaagagatggaggagggcgggctaggcaatggaatcagcaagaatacaggcccagaggtaagtatgataagaaaacaaaaaattgagctgggcacggtggctcacgcctgtaatcccagctctttgtgaggccgaggcggccagatcacttgaggccaggagtttgagatcagcctgaccaacatggtgaaaccccgtctctactaaaaattacaaaaattagccgggcgtggtggcgcctggctgtaatcccatcttctcaggaggctgaggcaggagattcgcttgaacccgggaggcggaggttgcagtgagccgagatcagcccactgcactccagcctgggcgacagagcgactccgtttcaaaaaaaaaaaaattaataattaaaaaaaaaatcgcagggcaagtgggcgcgcttgtagtcccagtcacttcggggagccgaggtgggaggatcgcttgagccagaaggtcgaggctgcaggaagccatgatcacgccactgccctccagcctgggtgacagagtgagaccctgtctcgaaaaataccaaaaaacaaataaacaaacaaaaaaccaaaaccaaaaaaacaagccactgacagttcttgggtatggttgagactcgagatgagatgccagtggggtgggcagtagaaagtgcagaataaaatgtacatttgaactgagtcaccctgcaaggcctgagaggccaaggcttcactgtgagtgggagctggtaggcttagcagcagagggaaaagcagcgtcgagttttggaggtcactcgacttaggtaagaacagactgactaactgctaggcattttcttcctttcgttcaacaaatatttgtggagtgcctattacgtgccagaagctgttctggacactgagaaacagggatgaagaagaaacagatccaagccttcctgagagtaacctccccaggtttcatggatgaggaaactgaaggtcgtcctgactcaggctcatggctccgaccccggcttctgtggttggagggcagcaccttacttagactcccagcgcacgtggagcagtctgccggtcggttgtctggctgcgcgcgccacccgggcctctccagtgccccgcctggctcggcatccacccccagcccgactcacacgtgggttcccgcacgtccgccggccccccccgctgacgtcagcatagctgttccacttaaggcccctcccgcgcccagctcagagtgctgcagccgctgccgccgattccggatctcattgccacgcgcccccgacgaccgcccgacgtgcattcccggtacggtagggccctgcgcgcacggcgccagagggatgggcgggtagagccaactgcctctggttctgctggcctccgctgctcgcgaagggattcctgctcccgggaggtgtasgagccgctttccagaagcacagcccagagacgtctgggcggcggcccacacaacgcatgtgttcggagctcgccgcgctctgcttttgctctaagcgggaaccatggcttctggccacgctggggaaccgaggaggtggccgcacccaagcaggggtcgaaagcccgggtggatgcggaacaaggatatgataggccttaagggtggrggatacctctgggctcgaaatcggcgggcggtgcaaaactcgaggtccagttctcggagcccatagagccaaaaaagcctcagcttgtccggggcgggttcttgaaagmcggaaagcggctgagtaccacgcggcttgcatttttctcttgggacgctcgagaggtgggctccgtgagggcagctgctgcctgcagattatagggagccctttgcgcatttattaagaagctactggtgtatctcgggctgcgctaggcacggcgcatgcaaagatgaagcaggcagcatcccagcccttccgcacctcagacggtcagttgagtaggatccgccggtaccaactcctccttttaacaaatrgggagaccgaaagctaggagacagtcagggatctctaagttcccagtgagtaggaggcagaggtgaggtgtagaactcgtttttgcatgtctctcgcctctagacgcacccttccctcatcccatgccctcccacctccgcccctacattaaaggtagcattggatcccggggccgttcagtgaagctagcaggtgtccgcaggaactcccttccccctgccaggctagaaaccttacaaggctgtctagaaatagcagtgatttgtaaggagagacccggctccagcttggtgactctgggctgactgcctgcctagaggtcctctckgatttttgccctttggagtggtgtcaaaactagacgtgatactttggggatgcagcctgtgatatttcctccagcgaatgcagtgcagggttggattaacaaggtggaaagaattcgagggttccaccaagtagctattaactctagggctgcaggcctcaggccttctgcagctatttctacactccctgtactgaaactatttcttcatactgggcctgacaggcctttgcaacaaggatcacggccgaagccacaccgtgcgcctccctcccggttggttaacaggccctggtttctagtattgcgatttaaagtctggcgctggctgcgcgccagacctgggaggctgccagctaggcttcacgttgctggcgtctgcttcrgggcattcattaggtctgaagtctgaatcccagctccctccctctcacccactgagctgcatagctccagattgcctctgcttacgggcggggcttctcagccttctgccttctggcccgatgcccgcttcccaacggccggaggccgctagactaatcggcttcgccctgcgcgctgtaatscgcatgcgcacgcgcacaagttcctgggcccgcccatcttccggacttgggcggggcgtaaaagccgggcgttcggaggacccagcaattagtctgatttccgcccacctttccgagcgggaaggagagccacaaagcgcgcatgcgcgcggatcaccgcaggctcctgtgccttgggcttgagytttgtggcagttaatggcttttctgcacgtatctctggtgtttacttgagaagcctggctgtgtccttgctgtaggagccggagtagctcagagtgatcttgtctgaggaaaggccagccccacttggggttaataaaccgcgatgggtgaaccctcaggaggctatacttacacccaaacgtcgatattccttttccacgctaaggtatgggccttcactcttcacagaccctgtcattaggcctttcaactctcttttggcaaccattaggttttttcccctccctttttagtcatctctagtgatttatagtggcaaatacccccaaaggaagtaaaatagcttaaaaaaatctcttggttaataaacattaaagaagctgtagtgacactaaatgtttttcctcctatagattccttttggttccaagtccaatatggcaactctaaaggatcagctgatttataatcttctaaaggaagaacagaccccccagaataagattacagttgttggggttggtgctgttggcatggcctgtgccatcagtatcttaatgaaggtaagtgagagtctaccacactggaagcccataccttgaccccatcctctacccccactcctacccctagaactgtattattacatttcatgtaacagtatttagatttatgcactcattcggataactttctgtgaaacaaacttttgaaatatgataatacaccaaaagtgtatctgaaattaaaaagaatcaaaggttgtyaggctggagacccagttcctaaaattcattattctgtattaacatgcatggattgactaccaatgaaaaggaagggtccatgattttaaatgagccaaaattcttttaaagtgatttttgaattgaaaatgacaattcaaaaattgtcatttattggtaaaattatatgggaaatcataagttctcccactcaaatctcattgcccctgtgccttggatagcaattttgttatcaattatggagctaaaatttaattagaaaaaagaaattgtgagtaaagcactccttattacactattgaaagctgatttatatttaaaagaaattgaggcagcttacaacattaaaatgtctgaggcggggcacagtggctcatgcttgtaatgccagcactttaggaggctgaggtgggtggatcacgaggtcaggagatggagaccatcctggctaacacgatgaaaccccatctttactagaaatacaaaaaattagccgggcgtggtggcatacgcctatagtcccagctacttgggaggctgaggcaggagaattgcttgaacccaggaggtggaggtggcagtgacccgagatagcaccactccactccagcctgggcgacagtgagactccatctcaaaaaaaaaaatctgaagttaagatgtggagtgtctaataaaagtaaaatgatgaattctgggttctaaatagaaayggattcaagtgagaagggactaaagacagaaatgagctatgaaaaggcctcgtaacaacacaggtgactctacatatgttcttaggaaaggccacataatayaccaacttttattccttacccactagatgagaaattgatgctgttttccccacacctacaaaccgcctatgttttttctctgtgatggcctctggctcaggtgtgggtaagaagagtaactgacactcattatattgtggatgatttagggatagatctgcagcttgaataacttttggtaacgatagaccacatccagttgtattaaagctgttattggtgctcctggcctgaaatggacctatgaactttgagttgcaactataaggatrttttttgccagtattatacactgcacaaacctatttatccataactgttagtattggttcatatatggaatcaaccagggaatagttcagattccatctctgaaagatgggcggaaatcagactttttaactttttaagtttttttttttgagacggaatctcgctttgttgccctggctggagtgcagtggcacgatcttggctcacttgacctcctgggttcaagtgattctcctgcctcagcctcccgagtagctgggactacaggcacccaccgccacgcctggctgatttttgtatttttagtagagacaggccttcaccatattggccaggctggtcttttttttttttttttttttttttttctgagaaggagtctcgccgtgtcgcccaggctagagtgcagtggcgtgaactccgctcactgctagctctgcctcccgggttcataccattctcctgtctcagcctcccaagtagctgggactacaggcacccaccaccacgcctggctaaatgtttgtattttttagtagagacggggtttcaccatgttagccaggatggtctcgatctcctgacctcgtgatccgcctaccttggcctcccaaagtgctgggattacaagygtgagccaccgtgcctggcctggccaggctgtcttgaactcctgacctcaagtgatgtgcccgcctcggcctcccaaagtgttgggattacagatgtgagtcactatgcccggccagaacatttcttactaatttcaagtcttgatgctggtcaatatcacctagttaaatgaataacaacctaaaattggtgtgtaggatggaatttgagagagtagacagagcagttttatataattggaagttattctagcaactgccagtccagtgttctgcttccacatctgcagtggtggaactcctatagagctcgcttcagtggggagacagggctggagagagggtcagtgctatctatgtagggwgtaatctgtaagtcagcttttgaaatggggtgccctctactttgaatatctcgatactgtactaataaagkaacagaactctcctatgccagaaatatagaaatttttcatgctcttctaaaaatctagaagtggcaattttccatttaactaaagatttgatgtcttttaggacttggcagatgaacttgctcttgttgatgtcatcgaagacaaattgaagggagagatgatggatctccaacatggcagccttttccttagaacaccaaagattgtctctggcaaaggttgatttcaacaagtttatattataatccatgcttgacttaaattctttttccagatggtctccatttgttgcttagggtagagtgcagttgcacaattatggctcaccacagcctcgaaccctgggctcaagcaatcctycttccacttcattaccccctccccctcacaaagaaactgggactatagggtatgctaccatgcccggctaatttttttactttttgtagagatggggacccactgtgttgcccaggcctgtcttgaaccactgggctcaagtgatcctccctccttagccttccgaagtactgggattgcaggtgtgaaccactgtgcccggctttagacttaartgytttatcaggcttgaaatcctagctctttaaagattttgttttaaatgccgggtgcaagagcctgggaacaatttgcacttaggtgcctgtgaatatcaawgtttcaatttctggcaaatggtttaaaatagaaatccaatttgtccatgctatgcaaaccatctgaattagaatgtaatgagtaaagcttaaaccttaggtctgtatttaaccacattgtgttacttacttgcccccacatcctttcacacacgaagttgagaatagggtaaataaatgagcctgttcagctaatactcttggcttgaccctttcacacttaacagcaccagccaagaaacctgaatgtgagcccaaatagtgtctattttgatacctgaaaatcactggccaccttgctgatgggcaactcccttcatcactggtttaactctcttgtgccatagggtatctagaagcaaaatatgtttgttaagtgtaaagctgtctctgcttaaaaacaagtccccctaccaccaccaccacacacacacacacacacacacacacacacacacacacatgaaattgcctgttcctgggctgataggacaccagttaagtagaaacaggagtatggaagagtgtgaacgttgagcttggggatcaaaaatttgaggatatgtaagaaattaataggagaatcaaataataaacttgatttcctccagctctccctaattgtagttacataaagttacaacttgactaaaactacaaggaagatgttgacatgctcttcctccatttargaagccataatgataaaactctaagaacaagaaaggtttgtggagcatttatggaacaaatttttgctgcctaggtaaaatttattctaaaggccttaatctggtcattattccccttttctctagactataatgtaactgcaaactccaagctggtcattatcacggctggggcacgtcagcaagagggagaaagccgtcttaatttggtccagcgtaacgtgaacatmtttaaattcatcattcctaatgttgtaaaatacagcccgaactgcaagttgcttattgtttcaaatccaggtgaggcttttgactgcataaaaattgacaagctatagtaaaactgatagtatatgatatatatattatatatattttaaatattttgaaatattttaaaaaatacatttttaaaaatattttcgaatattattttaaaatatatatatatattttgaggcggagttttgctcttgtcgcccaggttggagtgcagtggcgcaatctgggctcactgcaacctctgcctcatgggttcaagcgattcttttgcctcagcctctcaagtagctgggattataagcgcctgccaccacacatggctaattttttatatttttagtagagacagggtttcaccatgttggccaggctggttttgaactcctggcctcaagcagtccatctgcctcccaaagtgctaggattacaggcgtgagccaccgtgcccagccacgcatatttattgattcatttatttttcttttttttttttttttttttttgagacggagtcttgctctgtcaccctggctggagtacagtggcttgatcttggctcactgcaagctccgcctcccgggttcatgccattctcctgcctcagcctcccgagtagctgggactacaggtgcccaccacgacgcctggctaattttttgtatttttagtagagacggggtttcatcaggttagccaggatggtctcgatctcctgacctcgtgatctgcccgccttggcctcccaaagtgctgggattacaggcgtgagccaccgtgcctggtgattcatttatttttcatgtttcatttcccttctaaggagatttgtgtgtgtgtgttttttgttttttaataattttaaaacattaaagggaatacaatgcctttaaatgtagttggagcttaaaattacctgcccaagatcttggataagggataagtttgtgaataattgttattctctttttttttttttttttttttgagacagtctcactttgtagctcaggctggagtgcagtggttcgatcttggctcactgcaacctctgcctcctgggttcaagcarttctcctgcctcagcctcccaagagctgggattacaggcacgtgccaccatgctcggctaatttttgaagttttagtagaaaggggtttcaccatgttgcccaggctggtctcaaattcctgagctcaggtgatccatctgcctcagcctcccaaagtattaggattacaggcgtgagccaccgtgcccgggcccataattgtctcttagttgataaacagtttattttcataaaactgttactatactttttttttgagagcatgtctcactctgtcgcccaagctggagggcaatgggatgatcatggcagctttgacctactaggctcaggtgatccttcttcctcagcctcttaagtagctaggactacaggcgtgcaccaatatgcctggctagtttgttaaaagtttttttgtagagatggggttttgctatgttgcccaggctggtcttgaactgctggcctcaggcagtcctcccacctcagcctcccaaagtgttgggatwacaggtgtgagttgtcatgcccagccaaaactactttttgaataattaatggacttgatatacatagtgtagaggcttaaaaatattaacaaaattattggttasccatgatcaatatcaagatcctgaaaagccatatatctggagtagcctattattmtctaatgatcacctagtatctggttaagtgttttcttcatagtaggtatatcttttttgtgtgtagggagaggataatgggtgatttttattttctcctttttcatagtggatatcttgacctacgtggcttggaagataagtggttttcccaaaaaccgtgttattggaagyggttgcaatctggattcagcccgattccgttacctratgggggaaaggctgggagttcacccattaagctgtcatgggtgggtccttggggaacatggagattccagtggtaagcataagttattttctttttgttttwgaaaagattatataaaaagtcgatgggcattatattattcaattagagcctaatcaaatatccattcagtaggatggaatggtttcccgaaatctagcattttgtataattatatgttaagaattgttaagattgttgccattttatatggcattttatggcgagggggacgggaaatgaaatttctcttcttaccatggatatcttaagactgtagttcttaggatgtcttcagtcatttaatatcacagctgtttatacctgacttgtactgcctggccctgaaaagatgagcaaatccaaatgcacaaaagttatattatcacagttgaaaaatgttatgattagrttctgtatgctaagaaaaccccccttatgttctcatactatctttatatttcaaatatacatgggttaaacatttcaaytggctagagaaacaggttagaatacagttaaaattcttagttttacataatgtaagtaaatgaaaatctaatctaaaagtgagtaatgactacattagtagtcttgaccatctaccaaaattgagtattcttcctccgaagataagagaattaggaaaatgaatcacaattactaatctgttggtacatgaaaataaatgtagtctgtactatttcttttagtgcctgtatggagtgsaatgaatgttgctggtgtctctctgaagactctgcacccagatttagggactgataaagataaggaacagtggaaagaggttcacaagcaggtggttgagaggtaataaatctttcaatttggcaacacagaatattaacatttactatttttatttaaaaggttaaaattgtaatagtatttgcatttgagaactttttgttagaaaacttgtgtggtttttttgttttgttttgtttgagacagaatcttgccctttcgcacaggctgcagtgcagtggcgcaatcttggctcactgcaacctctgcctcccgggttcaggcgattctcctgcctcagcctcctgggtacctgggactacaggcatatgccatgacgcccggctaattttttgtatttttagtagagatggggtttcaccatgttagccaaaaaaaaaagaatgtgcctcaccttgcaaggcccaggccctaggatcacttgagctcaggagttcaaggccagcctgggcaacagggcaaaaccctgtctctacaataaatacacaaattagccaggcatggtggtgagcacctgtggtcctagctacttgagaggctgaggcaggaggatcgcatgagcctgggaggtcaaggctgcagtgaagcgagatcctgccactgcactccagagcctgctagcctgggtgacagagtaagagcctgtctcaaaggaaaaaaaaaattattgaaatagggaagctttcaacttggtggcattatttacctttgtggtcctgtgtggacctcaggtctatagaattaaaaaatgaatcatagccgggcatggtggctcatgcctgtaatcccagcactttgggaggccgaggcaggcagatcacgaggtcaggagatggagaccatcctggctaacacggtgaaaccccgtctctactaaaaatacaaaaaattagccgggcgtggtggcaggcgcctgtagtcccagctactcgggaggctgaggcaggagaatggcatgaacccggtagttggagcttgcagtgagccgagatcgcgccactgcactccagcctgggcgacagagcgagactccgtctcaaaaaaaaaagaatcataatctttagttcataacatattcttgtgattggtcaagcaaggccctcttgtttgtatttgtttaattaaataaaacctgtgaacccaccacccagctcaagaaagaaacacaatatctgtcaaataacattgttgaatcagaatttagtattctgctggtgtttggaaataagtggattctgtgctctttcccccagctatccctctgtccccctcacgctcccacttgagataatcctgagttaaggatgctatgttatcttggatttctttttaaaattcawtattatatttttaagaattatccaattttttttacaagtagctatagtttattttttgatagctgtgtaatattccattgtatcagtataccatgatttatccattcttctgttggaggacattggaaagattgtcatgkttttgctgttactaacagtactgttaatgaatatccctgtacataatatcctagcatacatgtgtgcaagggttattcttggtataatgcaacattgtggcattatttactgtaaaatgtgtattaatgaaaactttgtttttctttctttctcccaccctgctttttctgcctttacctatggtttcctatcatacagtgcttatgaggtgatcaaactcaaaggctacacatcctgggctattggactctctgtagcagatttggcagagagtataatgaagaatcttaggcgggtgcacccagtttccaccatgattaaggtaggtctatgtagtgatacgctgcatttgaatgctttttgctggctttttaaaaaagattcttctgagaaagattaatacaagtcttccattactgacttaagtgaaataaattaatgtacccacagcttaccttttttgaaagaaatggttgagctttaggattaatgtccattaggcctgttcaacacatagatrcttgataatttgactacaaaaaagtcttgttcaattatgctgaggtaggtggaagactataaaagaaataaactatttctccattggggaaaatagaaattatattcaagttagcattatgttactatttttaatgactttcttttatactattaattaaatcataactgaacacctggaaaggaatttctacttatcaaagttttttatttttttgagacagtctccctctgtcacccaggctgcagtgcagtggccgatctcggctcaccgcaacctctgcctcccaggtttaagcgattcttctgcctcagcctcctaagtagctgggactacaggtgcgtgccaccacgcccggctactttttgtatttttagtagagatggagtttcaccatattggctaggctggtctcgaactcctgaccttgtgatccacccgcctcggcctccccgaatgctgggattgcaggtgtgagccaccgcacctggcctcaagttgtattttaaaatcttcataattaggccacacacagtgactgacagctgtaatgccagcactttggaaggccaagggcaggagaattgcttgagcccaggtgtttgagaccaccctaggcagtatagtgagatcttgcctctgttaaaaaaaaaaaaaaaaaaaaaggccatgtgygggcagctgatgcctgtaatcccagcactttgggaggccaaggggtggatcacctgaggtcagtagttcaagaccagcctgaccaacatggtgaaaccctgtctctactaaaaatacagaattagccaggtgtggtggcaggcgcctgtaatcccagctacttgggagactgargcagaagaatcacttgaacccaggaggtggaggttgcagtgagctgagatcgcaccattgcactccagcctgggcaacaagagtgaaactccatctcaaaagaaaaaaaaaagcggctgggctctgtggctcakgcttgtaaccccagcactttgggaggccaagaggtggatcacctgaggtcaagaatttgagaccaacctggccaacatggtgaaaccccatctgtactaaacatacaaaaattagccaagtgtggtggcgcacgcctgtagtcccagaaggctgaagcaggagaattacttgaaccctggaggtggaggttgcggtgagctgagatcgtgccactgcactccagcctgggcgacagagcgagactctgcctcaaaaaaaaattaaaaaaaaaaagctttataattatagagactgtaagtcttgggaaacctgggaatgcatagacaaaatgtgagattttttttttttttcatttcatcttcagggtctttacggaataaaggatgatgtcttccttagtgttccttgcattttgggacagaatggaatctcagaccttgtgaaggtgactctgacttctgaggaagaggcccgtttgaagaagagtgcagatacactttgggggatccaaaagkagctgcaattttaaagtcttctgatgtcatatcatttcactgtctaggctacaacaggattctaggtggaggttgtgcatgttgtcctttttatctgatctgtgattaaagcagtaatattttaagatggactgggaaaaacatcaactcctgaagttagaaataagaatggtttgtaaaatccacagctatatcctgatgctggatggtattaatcttgtgtagtcttcaactggttagtgtgaaatagttctgccacctctgacgcaccactgccaatgctgtacgtactgcatttgccccttgagccaggtggatgtttaccgtgtgttatataacttcctggctccttcactgaacatgcctagtccaacattttttmccagtgagtcacatcctgggatccagtgtataaatccaatatcatgtcttgtgyataattcttccaaaggatcttattttgtgaactatatcagtagtgtacattaccatataatgtaaaaagatctacatacaaacaatgcaaccaactatccaagtgttataccaactaaaacccccaataaaccttgaacagtgactactttggttaattyattatattaagatataaagtcataaagctgctagttattrtattaatttggaaataytaggctattcttgggcaaccctgcaacgattttttctaacagggatattattgactaatagcagaggatgtaatagtcaastgagttgtattggtaccacttccattgtaagtcccaaagtattatatatttgataataatgctaatcataattggaaagtaacattctatatgtaaatgtaaaatttatttgccaactgaatataggcaatgatagtgtgtcactatagggaacacagatttttgagatcttgtcctctggaagctggtaacaattaaaaacaatcttaaggcagggtgcagtggctcatgcctataatcccagcactttgggaagcccaggtgggctgatcactggaggccaggaattggggaccagcctggccaacacaacaaaaccccatctgttaaaaaaacaaaacaaaaccaaaaaaaacaagtaaccttggtggatgtctactcaagttttctgcacatttttctgaaaatacaactgtgacccttatccaggcctgaaaaccatacttgtaaaggttaactgaacaacattattgtcattcccaactccaggatctttttccaaagattctttcctgagagctagttaagggaaggaattatcttaaagcctggttgtccaatcttttgctttccctgagccacattggaagaagaattgtcttgggccacacattaaatacactaacatgtgccagctgtggtggctgacacctataatcccagcacttggggaggctgaggcgggtggatcaggagttcaagactagcatggccaacatggtgaaaccccatctgtactaaaaatcgaaagatttgccaggtatggtggcctatgcttgtaatcccagctacttgggaagctgaggcacaagaggctgaggtgagaggatcgcttgaaccggggaggcagagattgaagtgagccaagatggcaccactgcactcgagcctgggcaacacagcgagactgtctcaataaaaattaaagaaattaacactaatgatagctgatgagctacaaaaaagttcatgatctggatacctgctgccacctaaagagtcctcacattcaaagggttggacacagctataaagcgtatcgttctgtggatttttagtgtattcacatagttggcaaccatcaccagtatctaatcttagaatataggctgggtgcagtggcttcaaattcccagcactttaggaggccaaggtgggtagattgcttgagcccaggagttccagaccagtctgggcaacatggcaaaagcctgtctctacaaaaaagaaattagctaggcgtggtggcaggtgcctgtagtcctagctgcacaggaggctcaggtgggaggatcccttgaacccgggagataaaggttgcagtgagccaagatcccaccactgtactccagcctgggtgacagagtgagaccctgtttcaaaaaaaaaaaaaagaatattttaattagcacaaaaagaggcctgtacttaatcctgtagccttttgtaaactttgagtcaccttcagtctttaaaatttttaaatttacattaattttatattatttgatacaataaattagtcaataccaacatgactgaaaaataatatttaagtgaaatagactgattctattaatctttcatgaattttcaaatgcaatcttgtaaagtttccttacttatgggcaaaataaatgttccaggttcagtttgtaccttcctgccccaggcaaggaataggccaactctgcaaagaaacttgattttttttttccatagtaaccttgggaactaaattaagcaggccttatccccatctcacagaagttgccagttagtgtagaagcaaatgtgatgctcagaacatggttctacttcctttttttcccccactaaagcccatgttgccaaaataaaactcagtacttcaaagccatgttctttaaaaattctttaaaatttttttttattttggccaggtgcggtggctcacgcctgtaatcccagcactttgggaggctgaggcgggtggatcacaaggtcaggagattgaaaacatcctggctaacatagtgaaactccatctctactaaaaatacaaaaaattagctgggcatggtggcgggcgcctgtagtcccagctactcgggaggctgaggcaggagaatggcgtgaacccgggaggcggagcttgcagtgagccgagatcggaccactgtactacagcctgggcgagactgcgagactctgtctcaaaaaaaattattttattttattttgtttttatttttgggggtagagatgggggtctccctatgttgccagactggtcttgaactcctgggctgaagcctcggcctcccaaagtgctgggattgcaggagtgagccaccatgtctggcccaaaaattctttagtgagtacctactatgctttggtaaatgttgcaatgtacaagaataaataaagacaaattttggttctaaagttactgcaatcaagtaagcaaaatgttaagtaagtttggagtatttgggcaggcatggatgaagagccagttctagtcatctagcatcagtttggccactaccaagctgataccttccttggccgccaggggcctgaggcaggtgtagagcttaaatttccagtccatccaggccagcaatctccctctcagcccggggataaatgaggttgctgtggaggtataggaccaagtggttgctgctcctgtctgctataggaggcctctagcttcaggctagttgctggttgagaaaagtgccataagagagagatatacaggaaatgatggtagttgacatttgtcaaggaaagccagagtatgtatgtgcaaagctgaaaatgaggaattaaccttgagaagggctggggaaagagctttcttggtttaaagaacagcaaaaagtcctgatccaaaaaagctgtccaaagcctagttggaaggaagtgtattgagtgtcctgagatgatatgggaagtgggggtaggaggccaaatcttgaagatctaggttgtggtaaaagtgggttactctacctgtaatggaaagccacggaagagtttaaagcagggttattgcataatctgaaccatattgaaaacaaatactgactgggtgcggtggttcacgcttgtaatcccagcactttgggaggccgaggtgggtggatcacttgaggtcaagagttcgagaccagcctggccagcaaggtgaaatacaaaaaaatacaaaaaaatttgcccggcggctgggcacggtggctcagcacggtggctcacgcctgtaatcccaacactttgggagggcggatcactaggtcaggagttggagaccattctgaccaacatggtgaaaccccatctctactaaaaatacaaaaattagccgggcgtggtggcgcacgcctgtagtcccagttacttgggaggctgaggcaggagaattgcttgaacccaggcggcggaggttgcagtgaactgagattgtgccactgcactccagcctgggcgacagagtgagactctgtctcaaaaacaacaacaataacaacactacaggctattataagaaaaataaattatattttggattttgaaaaaggttcaaatgcaaatactctacaaaagatggagtaggttgtgtccccttctgtgagatatatatctctctcacaaaaaaaaaaatatatatgtaaattttttttgagatggagtttctctcttgttgcccagtctggagtgcagtggcgcgatcttggctcactgcaacctccgcctcctgggttcaagcgattctcctgcctcagcctcccaagtagctgggactacaggcatgcaccaccatgcccgactaattttatatttttagtagagacggggtttcgccatgttggccaggctgttctcaaactcctgacctcaggtgatccacctgcctcggactcccaaagtgctgggattacaggtgtgagccaccgcgtccggccatgagttataaatattaacaatttcttgctgtaaattgaaagcatccttcgcgtctttgcgtttcattaccaccctctgttctctcaagagaaattctaactttatttcagcactcagtcctgaagttacagaagttaataattttttaaaatcctgcaaacaatgcatggatatccccgtcttgcacactctttgggccagtctagaattcttcccatcagcatttcggtgatctggaccgccgccacccacacagcgctccagggcagaaaagacgccccatgcccgcgcctgggccggcggggggcggagcttgcgtgctgacgcataagagccgagcgggggaacgtgcgtgtctcgagtcgcacggagggcaaccgtcgacgggcttagcgcctcaactgtcgttggtgtatttttctggtgtcacttctgtgccttccttcaaaggtggtgctttgtccctgtgggtcatctgtactgattgcgccaagcaaagcatttgtgagcgtgtggtgctggggtgaaagtggtggctgggggcagggagaaatccaaaagcccgctggtgccccagccctcccattgcctggtagactgggccttgctttaccctccccgcatcctttgaccaggaaattctttctttggcttccccccatccccggctccaacattctgcaaactgaagaggtagtttcttagatgttcagtgtggttaatccaatgaaattgcattatccctatcaggttctccaaatgtcaactgtcaaggagcagctaattgagaagctaattgaggatgatgaaaactcccagtgtaaaattactattgttggaactggtgccgtaggcatggcttgtgctattagtatcttactgaaggtgagtgagaagcccatcctgtggctgaaaatcaagtgagcacttcagagtgttgtatatgtcgatgtattcagggttgcaaggttaatcccttgaaagcaattatgtatcctttgacctttcctccctccctccctccctcccttccttccttccttccttcctttttctttctctctttcttttcctttttttttaaacttcttctttcttttcctttctttttttttctgactttccttttctttttctttttttgagacaggatttgtctgttacccaggttggagtgcagtggcgcgatcttggcccactgcaacctccatctcccgggatcaagcgattctcctgcctcagcctcttgaataactggggccacaggcatgcaccaccaggcctggctaattttttatatttttagtagagatggggtttctccatgttggccaggctggtttcgaactcctgacctcaagtgatccgcctgcctcggcctcccagagtactgggattacaggcatgagccaccacacctggctgccaataggtattgtttttaacccttgtgccctcctccctctctgcttttggagtccccagtgtttattgttctctcttttttttttttttttttttttgagacggagtctcgctctgttgccaggctggagtgcagcggcaggatctcggctcccggcaacctttgcctcccgggttcaagcagttctcctgcctcagcctcctgagtagctgggactacaggcatgtgccaccacgcccagctaatttttatatttttagtagagacggggtttcatcatgttggccaggatggccttgatttcttgacctcgtgatccgcctgcctcagcctcccaaagtgctgggattacaggcatgagccaccacgcctggccttaagtagggacttttacttctttcccttactgttcgcttttggaatctggctattgaaatctgaatgaatacactccttgtatatagttccgtactctgtcacatgtgacaaaaacccagtttaaattagggtaagcagaaaaagacgaaatattgttcatgtaactggaaatagggcaaaactgcttcaggtactaccggattctgaagttcacacatatcaagacatagtctttgtatatcttggtttagattttctctgttggcttaattcgtagagcctttctatgtggtggtaaagatggctgtacagtttgttcttagattcttgttttttctccaactctacagtccttactaatgttcttagatttgcatgttattcttagagcttatgattccaaagaaaagtgagatgtaatcttccgtcttccattttcaaacttcatagacatg

SEQ ID NO: 96165 - DNA, 21190 bp, Homo sapiens
  misc_feature (1)...(21190): n = A,T,C or G
gcctggctctcgtctggcggaacaatgagcgcttgcaggagtttgtgttggtagcctccaaggagctggaatgtgctgaggatccaggctctgccggtgaggctgcccgggccggccacttcaccctggaccagtgcctcaacctcttcacacggcctgaggtgctggcacccgaggaggcctggtgagaacagagcagcaagtagataagggggcaggatggagaagagagagacttgctggtcctgacccaatctctgtccccaccaggtactgcccacagtgcaaacagcaccgtgaggcctccaagcagctgttgctatggcgcctgccaaatgttctcatcgtgcagctcaagcgcttctcctttcgtagttttatctggcgtgacaagatcaatgacttggtggagttccctgttaggtaagcagtggaccttggtaactgtgggtggggtgtgaggaccaggatgggcatcctgagcgcctgttgcctgtctcacccctccctgactggacctgacctgcaggaacctggacctgagcaagttctgcattggtcagaaagaggagcagctgcccagctacgatctatatgctgtcatcaaccactatggaggcatgattggtggccactacactgcctgtgcacgcctgcccaatgatcgtagcagtcagcgcagtgacgtgggtgagggcacacacagccagcaggataggtggtaggggtggtggtgcagactttgttcacactcttcccaccctgctgtaggctggcgcttgtttgatgacagcacagtgacaacggtagacgagagccaggttgtgacgcgttatgcctatgtactcttctaccgccggcggaactctcctgtggagaggccccccagggcaggtcactctgagcaccacccagacctaggccctgcagctgaggctgctgccagccaggtgaggcatgtgggaggctttacagaatactgggggacagttcacagactggggccgggttgggggatatagcttcctctcctccagccacaggcccattgagccttgggattcatgagaattgcagagttctcttaacatcaaagctttagccagaggcatccccatgccttggggacactaacaaacatacaagtacactaacatgctgccactggcaagcacattggcacctacttggcacaggtcaggcaactgctctgaacctcactgggcactatgctgtgaatgaactatacctgacactctcctagatttcctctgcacattccccacatgctggcccacacaccctcacttgtgatgtccctgagttctagtgtgcactcaagacaaggcctatttgggctggccatggcctctggtggctgttatactctttgaggtaagcatctgtctttgctgagccttcaggatcttctctttagtgacatggtgtgccataggcccagttagtgggcgtaggcacatctcttttctggactggccgtctcctttctggctccatcctctcttgagccttctctgtcaagcttagagaaatccttgcagaagactggtcaggatctgggtatgggtgggaaggagcaaggagattgctctgggattggcagtcctgttctctatgaatcggtgtcctttggggaggcctggactgaaatactaaccagataactcccctcccacctccatgcggagctgcatgtggattgagagctgtttagggtaggccaaaatgctgtcaagattctcttacccttgtgctcttactctggacagccctgaggttggctgcctgccttcctccttgctgtttgatctagaatgcagggtgttagccccagtcaccccaggtgggactgtcatggctaagggtctcagggacactgggtcctccccacccccggggtgctgatggccgtttccacataccctaggcttcccggatttggcaggagctggaggctgaggaggagccggtgcctgaggggtctgggcccctgggtccctgggggccccaagactgggtgggccccctaccacgtggccctaccacaccagatgagggctgcctccggtactttgtcctgggcaccgtggcggctttggtggccctcgtgctcaacgtgttctatcctctggtatcccagagtcgctggagatgagctcgcctgcaggcagctgctgtgagctggcctacctgcctgccccaggccatgcctgcctttgttgtggggaacacctctgggctttgggcctcagcttatgcatctggtgggagagggtggggaggttgtggcccctgcaggggcagagtatcctagggtgtgtatccatctggctgtctgtccattcatcctgctgctctgacccttggcctcaggcttggccctgcccaagctacttcctgtacttaaaagtgttaataaaaccagactattcaggcccaatctcgtctctctgtctcaacgccgctgctgtctgcgcctgccttgggaccctcccttgggtgccagggctccaagccagcacccccgggatgccaggcggcatgctgggcagcccccaacccctgtcctcgtattctgttgcagggactaggccctggccaggcccccgaggtggcccccacgcggacagcccctgaacgcttcgccccccctgtggatcggccagcccccacctacagcaacatggaggaggtggattagcaggtccctggctgatgggggggactgggtttgggacacccacacagagggccagctccttgccgcttctccttctctaacccagaggacactggctctgtcartgggaagctgaggggtatgatttgggtgtggagacctctcaggttgggacttcttgtcagcttggacccctgaccagtgggctttggcttctccagccgcctccagtgctgcgtgatttgattctgwtgtaccttcaattcttctgacccgcattataaacattataattttattctaaaaattgtaattttttttgcattttggaagtgactgctgctgtttaaatatattttaaaaataaataataagtaagtagacttagtgactgtgatccaccacatgctggggccacctcccctccccatcatttgcggtgtgtatgtgtgtgtatgtgtgtttatatatgagagaccctgaaagtgccctagtctgaagggagatgatggggtcccagctcatgtcctatgggtcatgaagcccccagtgctatcagctctttggagcctacctgctgctctttcatcccactggttctggatcctacataagaggcagcttggtaggcatcgtcaggatctcaatatagccaagggacagaggagtatatgaagcactggagctgacagcgtggagtaaaaggtgcattcaccagagcagcctggggctgacaagtcagggaggacttgggggacagaagtactgggagatcttcctcctcctctcctgtcctcagctttttctttgctgtaacttgaacactaactgcatccctgcaggtaacagagcaggaggaaaactgctgtggggcagatcttgctgccctgaaaagaggacaagcagagaggaccagagtgaatcttgtctgacttctattggagggagggtgctggggcctgccagcctgaagagtcttcccttaagagttcctgaagccttccttctttggccaggcatggggggctcacacttgtaatccccgcactttgagaggccgaggcgagtgggtcatgaggtcaggagttcgagaccagcctggccaagatggtgaaaccccgtctctactaaaaatacaaaaattaggtgcagtggcgggcacctgtaatcccagctacttgggaggctgaggcaggagaatcgcttgaacctgggaggcggaggttgcagggagccgagatcgcgccactgcactctagcctgggcgacagagcaagactccgtctcaaaaaaaaaaaaaaaaaaaaagttgctgaaactggccaagtgtggtggcttatgcctgtaatcccagcactttggggcgaggtgggaggatagcttgagcctaggagttcaggaccagcctgggcaacatagtgagaccctgtctttaccaaaaatataaaaattagctggctcttatggtatgcacttgtagtcccaaatatttcagaggctgagatgggaggatcgtttgagcccaggaggttgctggaccctacctctgtccattccacgactgggccttgctggctgctgcctggtttttccacttggtcatctttgtcttgacttttcctggaagcagtgccaggggcttatgcaggcaagctaacctccagactgggcccatacaatttaacatttctgctttgtgcaagtcgtagacatctagggcactagctggatatcgactggtatgctaccacttgtggcattcttggtgacactggtggggctactgcctcattctatgacttgtagccatggcgtccacagtgtaccatgaagtaaccagggaagggagtgcagatcttgatctcattgagggagccatcactagacctgtaggacttggtgatggtgctacagtgaatctattggcagcatcaggtactgaggaaatagtggcagtggcaggcactctgcatggctttgctcaccatgggcacctttatggtgggctgggtacttgcagcttcaaatttggtgcacggctggtgtggctatggctctgcttcttggtacctgtccttagcaccactggtctgcatcccctgcttaattcctgcacctggcctttctcatgcagtacactgcagggctaggcatctggctggggccacggggccatggagatgtgggaagccccaggacagcattggacctggatagcgatacagcatgtggccctggtctgcacctggcatgtgatcattaggtggtatccagatgtaggcccagacttggaggttggtcattaataatgggatgtgggcacaaaagacacagaatatagataaagactagtcaggatcctgcctattccttgaaggtccagaagtatgagcatcaccaattcctgcaagagctccaatctcaaatttggggatttccaccatcccaccaccagctgctcattctctgcaaccccctacctcagtcccttactaccttagtcccttttctcacacacacacaaagtctctgttctgtttcagccagcaggtcctggaagtccagtgagactgtggaaagatccccaagcacaacagctataatcatgaagctataaccatctcatttgtcccaccctctcacaagctcaataaaatatcctctcaaaggcctgcagagggatttcaaggtctaatttgcttgtggttttcctgataatgctttggcaagagggtaagtgtgggatgagatttttttttcttttctttttttttttttgagacagtcttactctgttgaccaggctggagtgcagtggcacaatctcggctcactgcaacttccgcctcccaggttcaagcgattctccagcctcagcctcctgagtagctgggattacaggcgtgcgccatcacgcccggctaatttttgtatttttagtagagacagggtttcaccatgttggcgaggctgatctcgaactcctggcctcaagtgatccgcccgcctcggcctcccaaagtgctgggattaaaggcctgagccactgcgcccggccaagattttaaaccaaatcatcatagaacttatgtgaggtccctcctggcccagacccgtcccttccctttcctggccagctgtgtccaagtgggcacctgaaaaccggcggacttatggggcccctggatcggtcattccacacattctctacgatggagtctggatgagggatttcctgggcttcatttgttcaactgtttccatgacaactccaaagctgtggcgtcaaaagcgtgacagggactcgcatttgcccccgaggacaattactatattgagatggagttaccagggctgaagtagaaaagtcagagcaaaaccacgcctgtgtcttcctcctgcctcagggacgaacaccttccttccaggtccgtggcaaatatctccaaaagccctgccgcctgccaacaccccttcaagttcccagttccacggaggcggaagcaaagcccccggaaaggccggtttgtccgccctgtgttgtttaaaggggatagacgaccttggagcgccccgccccctcccgccaaggaaggaccccattggctctccccggaggcttcactctcattggtcagcgagtgaatgccgacctgcagactggggcctaagtttcttttagtttccggtgtctctgcaatggcggctctagactccctgtcgmtcttcactagcytcggcctgagcgagcagaaggcccgcgagacgctcaagaactcggctctgagcgcgcagctgcgcgaggccgctactcaggtgcgagcccctctgcccccggcctggtttgcagaccatgctgcaacgcagcgcggggcggggtccagatcccgacctgccccrtttgtyccgccctttcctctcactgagcgcggggcttctctcttgacccctctgacctcaggctcagcagaccctgggttccaccattgacaaagctaccgggatcctgttatatggcttggcctcccgactcagggatacccggcgtctctccttccttgtaagctacatagccagtaagaagatccacactgagccccagctaagcggtgagacccctacctgtcctgccagttcgcaccaatgcctcccttcagccaagacccctgtcttccctttttgccaagtcctccagtttctttctagacacctagttctgcacaggcactgaggcatggaaggggtggcctatggtgagactgacacgggaactgtcagggtctgaggggggatccactctcgacacgtgcttctttcttccctgtgttctctagggtggtggtgccagggcttaacttttcaggaggccagactatccttggagtttcatgagattaggaccctgtctgtccacttcttggagcagagatgccacaaactcacgggctctttcttctcagctgcccttgagtatgtgcggagtcaccccttggaccccatcgacactgtggacttcgagcgggaatgtggcgtgggtgtcattgtgaccccagagcagattgaggaggctgtgagtctttccccaggcatcgtctgcctccccagtcctggccatggaaaggagtggctcagtttccctcctcaggaagacccagagtgagggtgtgggttcccagaatatctctaaaggtggctttcctgaaccacatggtttggctttctgcaggtggaggctgctattaacaggcaycggccccagctcctggtggaacgttaccatttcaacatggggctgctgatgggtgagcagggcctggaacggggctatattgttctctctggtcatgccttttcttctgggcacgagtgagaaggaggtgggggaaggaacaggagtgacttaaagtggtctggctgggctcaggctctggttctggtggtcagccaggacctttccttgggaaagaggtggggggagtactcttttttgcctttctgcagctccttgtgcctatgcttctaggagaggctcgggctgtgctgaagtgggcagatggcaaaatgatcaagaatgaagtggacatgcaggtgagcgtgcttcactaagctgaagctggcaaagactctggcatgaacagagcctggaatccactaagggataaaaggcaggaagagggctgggcatggtggctcacgcttctgatcccagcactttgggaggctgaggcaggaggattacttgagcccaggagttcaagaccagcctgagcaacatattgagaactcctctctacagaaaatttaaaaattagccagacatggtggtgtatacctgtagtcccagcaatttgtggggctgtggtgggaagattgcttgaatctaagagatcaaggctgcagtaagctctgattgcaccactgcactccatcctggagtacagaatgagaccctgtctcaaaatcaacaacaataaaaaaaggtgggagggggctgggcatggtggctcacacctgtaatcccaacactattgggaggctgaggtgggcagatcacctgaggtcaggagtttgagaacagcctggccaacatggtgaaaccccatctctacaaaaagtacaaaaattagctgggtgtggtggcgggcacatgcagtcccaggtactcagaagggctgaggtaggaaaatcgcttgaatccaggaggcggaggttgcagtgagcggagactgtgccattgcattccagcctgggcaacatgagcaagactccagtctgggcaacaagagcaagagcattttaagctagcagacccacatgagaagagatgggatgggctaggtaggttttttcagtcagtgctggtagataggccaggaagccttgggttggtgggtaggatyagtcaggggctccttgaaagaggatactcctgcctctgcctgattctggtctctgctcaggtcctccaccttctgggccccaagttggaggctgatctggagaagaagttcaaggtagggatgggcatggccctgagtccctgagggtgaggtgaggtatggtgagacttcaggctggggaaggaagtgtctgaccacagggatcccaagaccctatccaagagaaaatttgatgccattttctgaagcacctggggcttctttcaggtggcaaaagctcggctagaagaaacagaccggaggacggcaaaggatgtggtggagaatggtgagaagcttgagactcctgtcacagcattcagctccctgacttctgaacctcctcagaagagtccttacaggctcctcaggcccttggcttactcagtaccctgacttctgtctcaagactgggattcctggtgtttcttttgttccctttgcccagagactggcatgagaggcctcagatgtctggctctagatatcttgtctctggaattgagggaataggggtctaytcagttctgttctggctgtaggatatggtaaatgtatctagaggacaagttttccttgttttgttccccacaggcgagactgctgaccagaccctgtctctgatggagcagctccggggggaggcccttaagttccacaagcctggttagtgggcatgtcaaaaccctggggagggctggatcttggcagcagctcctatagtcaggcccctggggtcagaggctttggctgcagcctggtccttaggcttattctggtcctggcaggtgagaactacaagacyccaggctatgtggtcactccacacaccatgaatctactaaagcagcacctggagattactggtgggcaggtgtgtggggatgtggccatgtgagcttgtgccatcaaacacctgcctgagtgcctgggctgcgtccatactgccccatctcacccatcaccatggccttcctgggagggaacatctgtttctttaaggtcatctgagctcagactttatttctcttttcccatcccccttattttaggtacgtacccggttcccgccagaacccaatggaatcctgcatattggacatgccaaagccatcartttcaactttggctatgccaaggtaagcatgtgtctagggacctggcaagcaagatgaccacttgctgttcccatgagtggataccatatccctgccttgctgtctgctcccaataatgtacccaggtgggcagaggccatggaaaggaaccacatgtgtgacagatacctaggaatctattgagcttattggaataaatagctccctccctctgaggagtcagtgagttcaaatttgggggagttgccagtgcagtccctaggcttagaaagatgctaggttagatacaggaaggtgagagaagctcttgaagacatttttaattctgacatgagtccgggttgggtggctcacgcctgtaatctcaacacttcgggaggctaaagtgggtggatcacttgaggtcaggagttcgaaaccaatctggccaacatggtgaaaccccatctctactaaaaatacaaaagttagctggccatggtggcacacgcttgtagtttcagctactgggaagctgaggcaggagaaacccaggaggtggaggctgcagtgagccaagatggtgcaagataatcaagactccatctcaaaaaaaaagaaaattctgacatgagagtgctctgtgaatatcctagtttgataaacaggattgtggggctgatggatgatgtgggagttcacagatggtgcaactttcctaggccaacaatggcatctgttttctgcgttttgatgacaccaaccctgagaaggaggaagcaaagttcttcacggccatctgtgacatggtagcctggctaggtatggactaggcaaagcctagaagggctggtggttagtgggcctctccttgggccatggcctgcccactgggtgtttgtggctggctgctcatactttgtttmattttgccccaggctacacaccttacaaagtcacatatgcgtctgactaytttgaccagctatatgcgtgggctgtggagctcatccgcaggtaaggccagggccatgacgtagagccaggcagactgactaggtcacagccatgctgggcactcacaccgcttccccacaggggtctggcttatgtgtgccaccagcgaggagaggagctcaaaggccataatactctgccttcaccctggagagaccgtcccatggaggagtcactgctgctctttgaggtggggtcctagaggagcatctgggtttgggtgggccaaggtgctgagaatgagatgctcctgtgcttasagacagcctgagtccttgttcccctcaggcaatgcgcaagggcaagttttcagagggcgaggccacactacggatgaagctggtgatggaggatggcaagatggaccctgtagcctatcgagtcaagtatacaccacaccaccgcacaggggacaaatggtgggtgtagaatggggtggggtggtggggctgccgagcagggcgatgggccatggggtagggcagagtagggctggatggtagggcccactgcctatgccccacaggtgcatctatcccacctacgactacacacactgcctctgtgactccatcgagcacatcactcactcactctgcaccaaggaattccaggcccggtgagggagctgggtccatggggtggtagggccagtggaattccagcagcccttcctgtggtctctgcctggttccagagctggccagtgctaaccctactctcccaccccagacgctcttcctacttctggctttgcaatgcactggacgtctattgccctgtgcagtgggagtatggccgcctcaacctgcactatgctgttgtctctaagaggaagatcctccagcttgtagcaactggtgctgtgcggtaggtgcggctgtttggcttatgaaaggttaatggcatatgctcccaaaggccttctcaccaccttcttatccacagggactgggatgacccacggctctttacactcacggccctgcgacggcggggcttcccacctgaggccatcaacaacttctgtgcccgggtatagcccagcaggttgggtagatacattgggggttgagtgtggcagtttgtgattgtagctgtgactgatgstgaactttcctgccaggtgggagtgactgtggcacaraccacaatggagccacatcttctagaagcctgtgtgcgtgatgtgctgaatgacacagccccacgagccatggctgtgctggagtcactacgggtcatcatcaccaactttcctgctgccaaggtgggcctgcctcaacatgtgtgtcacatgtgtgtgtgtagctgggggtacacttggctctgggcatgggggtcctaatgctgagtatgactcatacctgtctcctgtctcctgctatagtccttggacatccaggtgcccaacttcccagctgatgagaccaaaggcttccatcaggttccctttrcacccattgtcttcattgagaggactgacttcaaggaggtaaattgtgggggtggagggtcccgtttgctgctgagtctggtactgggaacctttcatctcctcatctctgtcagtccatctacttcctgcttcagatgaaccaatctttgccagacacgggggtagggaagcttccccacttgtttgacccttgcagcctcatgtgtctaccccacttcctatctctaggagccagagccaggatttaagcgcctggcttggggccagcctgtgggcctgaggcatacaggctacgtcattgagctgcagcatgttgtcaaggtgagagccagctgcagccttcctactgcagtgcctgctggggccaagatgtgagtatagcctgcagtcctsgttgtggttcccgggtctaattgctgctcccctccccccacttccagggccccagtggttgtgtagagagtctggaggtgacctgcagacgggcagatgctggagagaagccaaaggcctttattcactgggtgtcacagcctttgatgtgtgaggttcgcctctatgagcgactgtgagtgaacagagctggggtgggggcaggtacaagatgcacattgcctgctatggctgcccagctgggggtatgaccttcactttggctgcagattccagcacaagaaccctgaagatcctactgaggtgcctggtggatttttaagtgacctgaacctggtaggttcatgaggtttggggtgagggaggtaggcctccctggttggatggttgcctgagttccctgcctgcaggcatcactacacgtggtggatgcagcattagtggactgctctgtggccctggcaaaacccttcgacaagttccagtttgagcgtcttggatatttctccgtggatccagacagccatcagggaaaggtgcttgactttactcacctgccctcatctgcagcagtgacagtggctgccgttcattgtgccaagtgctctgcatacattcccttagttaatcctcaccacctgagggagttggtattcatattctactagtgaggaaactggcactgaggataactccaggcacaaaattttgtatgaaggctgcctttttttttgagacagtcttgcactgtcgcccggggctggagtgcaatggcaccatctcggctcactgcaacctctgcctcccaggttcaagtgattctcctgcctcagcctcccgagtagctgggattacaggcgcctgccaccacacccggctaattttttgtatttttagtagagatggggttttcaccatgttggccaggatggtctcgaattcctgacttcatgatctgcccgcctcggcctcccaaagtgctgggatcacagtcatgagccactgcacccgacctcttttttttttttaattattattttttgaggcagggcatggtggctcacacttgaatcccagcactttgggaggccaaggcaggctgatcaccagaggcagggctaccaccagnnnnnnnnnnnnnnnnnnnnnnnnnnnnnaaagatattatttttaatatctttcgttaaggcagctaataacctttctttttatttattttagagacggggtcttactcttgcccagggtggtgtgaagtggtgcaatcatagctcactgtggcctcaaactactgggctcaagctattctcctgccttagctgagactacatgtgcacactaccatgcctggctaattttaaaactttttgtagaggcaagttctcactatgttgcccaggttggtcttgaattactggcttcaagcagtcctcctgtctcagcctcctagagtgctgggattataggcatgagccactgtgcccagccaccctgccatccttttttttttttttttctttttttgaaacagtatctcgccctgttgcccaggctggagtacagtggcacgatctcggcccactgcaacctccgcctcccaggctcaagccattttcctgcctcagccttccaagtagctgggattacaggcacatgctaccacgcccggcaaatttttttttttttttttttttttttttttttttttttttttttttgagacggagtctcacatgtcgcccaggctggagtgcagtggcacaatctcggctcactgcaagctctgcctcccgggttcacgccattctcccgcctcagcctcccaaatagctgggactacaggcgcccgccaccactcccagctaattttttctattttttagtagagacggggtttcaccgtgttagccaggatggtctcgatctcctgatctcatgatccgcctgcctcggcctcccagagtgctgggattacaggcgtgagccactgcgcctggcctaatttttgtatttttagtagagacggggttttgccatgttggccaggctggtcttgaactcctgacctcagattatctgcctgtctcagcctcccaaagtgctgagattacaggcgtgagccactgcaccagcccaccctgtctttcttactccttaaagtagggggcaaacatggtggttgttataatccatataaaactataccctggacccccacggtggttgttatggtccatataatactatagcctagagccccattcagtcccttacccaaagtcacaaagttattgaggacccgggcctcctgacccttagtccctcggcttctttggcttaagaaggatgttagggggaggtgtctgtggtgaaacctgcccaggcctccctggccttgttctgggttggtggtcatccttttccctctgccctccagcttgtctttaaccgaactgtcacactgaaggaagacccaggaaaggtgtgagctggaagcactgaacctacctcatcctcctggagggtgtggctaccctcgccaccccaaattccatgtcaataaagaacagctaaattctcctagagtctgtgtgttatctctgcacttctagcatctgaaggccctgaagacatgctggcggtggtggtatgattgggggatggagatgtgccttttgcacattttgtctgtgagaatggactttcccagaacagagtggtactgacagctttgaaagcaccggtgcactttttggtgcttaaaggcaggggcctgggtaggattcataccctccgcacctggtctgagagaatggagggccctggggtgtttgtccatggttaggacccctgtgccagagggatctaaaaggtttgtttctgctggtgtggagaggcctagctcccagtctgatcattcagcatataatttttttttttttttttttgatacggagttccactctagcccaggctggagtgcagtggctcaatcttggctcactgcaacctctgcctcccgggttcaagcgattctcgtgcctcagcctcccaagtagctgggattacaggcgggcgccaccactcctgaataatttttgtaatttcagtagagacggggttttgccaaattggccagactggtctggaactcctgaccccaggtgatctgcccgcctcggcctcccaaagtgctgggattgcaggcgtgagccactgcgcccaatcagcctataattcttttttatttttgagacggagtctcactcttgtcccccaagctgcagtgcaatggtgtgatctcagctcactgcaacctctgcctcccaggttcaagcagttttcctgcctcagcctcttaagtagctgggatcacaggcatgcaccaccacactcggctaattttgtatttttagtagagacggggttcaccatgttggccaggctggtctcaaactcctgacctcaggtgattcacccgcctcggtctcccaaagtgttgggattacagacttcagccaccgtgcccggcccattcggcatataatttttgagtgcctactacgtgccaggcaaagtgagatggggcatacgtgctgtggtggccttccaagttcacgggaggggaaatgggtgaccaagcactgtatgggagcggtctccctggggcctgtgcaagactggaagaggttcctgacccagcctgggcctcagaaaacattactctaacgaagtgacttctgaagggaatcacgaaagactacggggagtttgccaggataagaggaacaagggcaaaagctccgaggcaaaaagagtctacagcaggctggaagccctctgggggcagtgtaggctgctgctgaggcccgagtgtgcctgcagctttaacgccttccacattttccctgtatacaaacactaggctacccgggggcccgctttaaggtggacccaactgcggaaggctgaactcagatggcagcagacagcgggagtaccagatgctgactcctccaggaggtgagcaacctagaggcttcccaggcagggcacggctggggacgccaggcccaggacagaagtttgtggggtccaccttaagcgagaggccgagcctggccaggccccgccccgcgtgggcgtgctcgaccaaaggaggctctggcgggcgacggaaggtgggtccaaagagctagcttggagccctagccttccgagactccactactaggccaagccacggccctagctccgccccacatggagaggcgtccatgggcggagcgagccgctccataccctaggatccactatccgctctagcggccagaagcgcggccaccttcccctgctgaagcgttcactttaattttggccggtaggcagtcccagatctcgcgggatccgacgccccgattatcgcgagaggagcaatcggctcctattggctgtgagggttgaatgtaagatggcgcccagggagctgtgaggagaaaaccctgtcggtcttggagcgacgacggcagaaccagggtccctggcggtgcggcggggccggcgggtgcagcggaggcggcggcggcggcggcagtgacgtcgccgggtgagggctccagtgcgggtggggatgcggcgaagctgtaggcctgagacggggggcccaccccacacaacggcgggcgggggcgggcgggccactaccgctgggccctggagagttcggggcggctccggagccgaaaacgttcctgggctagcgcaccccgccctgtggatgggggaggggtggcccggggatttgggtgggcgcggcgcgagatggcgcgccggtgcgggcgcgcggctgagcctgtttttacgcgcgcgcgctgtgcggctctcggtgcgcgtggccgccgacgtgcgcgttcccggcccggatatctctgctctaggagctgtggcccgtgggcaaccgcggctttctggagcgcgcgcccgtgacgacccccagttttggggcgcgcgctctgatatcgggtggcggtgctgcctcgagagcgcgcaggaggcttctgctgagcagagggccggccgcggctcgttgcgctgggaaggttgaggattgggtcctttctggtctggtgacgttcccgggcatccgtggcctcggcctggagagaaaccaaccagctttgctgtctggcttgcggttccgctcctctgtgaggggggcgagattgcccgttctcctcgaagaatgccgttacttgaggcccaagtacggtgcgggtgcttgggtagggtgtttctctgcttcggaaaccaagccctcttggtttgagagggcagtgagccccttcggatttcctcaccttgtactgggctttctgccgggcagggaaggttaatattagaaggcccttgagtggtacctgcttatctttcattagaaactaatacgtccataagcgtaattcatacacgtcacctctgtgcgctccggaagggaattcgcttatgtggcccatgtgaactccgagctctaaaatgccagtttaaatccttaaacgcagcttttcttttgcgtaagtgggaggggcttactttattatattaaaggcccacctttgcctcagccaaaaagttggccttaaacaaaatggaacaacctgagaatcagtgctttaccttttttgaaattgcagaaatcccagcagaaattactaaaatctgatagtgtatcactgtaaaagtcacttttggtgtaggatttcagtccttttcagctctttttttgaccctgccgctgtgttttggtgtcaaggaagttctaggtttgttctagagaaayaggcacctcttttttctaatacaaaacatctgctagtttgatttacagtcttgctyaattaagcttaaggaataggaagctaagaggaagtaaaattagccatcaaatttgataatggtggggtagttctttctaatgtactgtattgtttttaagaacaaagttaaaattattaataaaaagaggctgaggatggaaggaacttttttgttctatcttcttcagaatattagaagtcttaagaactcaggacaagcagcagaaatacatgcaacatggtgactggtgagttaaaattgttcatatcctggaagtatctgtgcacagttttttttctggtaatactgaagcattacaaatcctgtcaattctgggtgctgtcttccagaaactattaggtgctgtaaaatgaagatgtgggagaacggcatctttgaattcagccacagttcgctacttgctcagttttctcctcttaggatataagtcagtggaacccgcagatttaagcgtttgcaggctcagcttttaaacggacctaaatggttcaaagaaaagctgtaaagtttttctaggatacacttaaaattttgactttttttttttttttgagacggagtctcactctgtcacccaggctggagtgcaggggtgtgatctcggctcactgcaacctccgcctccctggttgaagcgattctcctgcctcagtttcccaagtaactgggattacaggcatgcagcaccacacctggctaattttttgtatttgtagtatagacggggtttcaccatgttgatcagactggtctcgaactcctgacctcgtgatccacccgccctcggcctcccaaagtgctgggattacaggcgtgagccaccgcgcccgaccaaattttgattaattttttaggcttgcttgttctgggttatctttatttttaactattaagcttgagatcttccttttaaattggtgtttataaatactttttctccaagtttgtcaactaagatttacttattagatgtcttccttcgggtcctctctgatgaatttttcctataactcttcgagaacctctgcagttccacatcctctctccagcttatgttgccatttcaaactaaagatcaaatagtggtttaattttcttgtaaatttgaattgctctaggaaagtaaccaaagtcaggggctctggatgtggctgcctttctttaaggcagcttcagaatcagggatgtctttccttactttggatatgcttttttttttggatatgctttcttttagtttaattagttgtggtttatacttcatgtgccatatttctttcttgtctgctttttaaatggccactcttgatctgtaagggtctctgatttctgaattagccttagaattaggtgttacatgaatacctgttcttttctttttatttttattattattttttgagacggagtctcgctctgttgcccgggctggagtgctgtggtgcaatcttggctcactgcaacctctgcctcctgggttcacgccattctcctgcctcagcctccggagtagctgggactgcaggctcccgccaccatgcctgtctcattttttgtattttttagtagaaacggggttttactctgttagccaggatggtctcaatctcctgacctcgggatcctcccaccttggcctcccaaagtgctgggattacaggcgtgagccaccgcgcctggcctattacctgttcttttctgttattctgttgtactgcattttgttccagatgttttaagtcctcttcagacttcacttaaatgcttcctttgtattttttcctagttattacattagattgtgatttctgttattaaattgatgtggctgcatgaagaaatggtagattaatttcttcctttgctgaaagagggaaggagtgctcctttggtctcactcttcaggccagggcaaaactgtaggtagaaatggtggctgtgtcagaaggctaatatttttctctttttctcttttctcttttttttttttttttttgagatggagtttcactcttgtcgcccaggctggagtgcagtagcacgatttcggctcactgcaacctccaccttccgggttcaagcaattctcctgcctcagcctctggagtagctggaattacaggtgcccgccaccacgctgggctaatttttttttttttttttttttgagacgtagtctcgctctgctgcccaggctggagtgcagtggcacgatctcggctcactgcaagctccaccttctgggttcacgccattctcctgcctcagcctcccgagtagctgggactgcaggtgcctgccaccatgcccggctaattttttgtagttttagtagagacggggtttcaccgtgttagccagcatggtcttgatctcctgacctcgtgatccgcccgcctcggcctcccacagtgctgggattacaggcgtgagccactgtgcccggctgatgtctggctaattttttgtatttgtagtagagacggagtttcactatgttggtcaggctggtcttgaactcctgacctcgtggtctgcctaccttggcctcccaaagtgctgagattacaggcgtgagccactgcgcccgcccatgtttttctttgttttaaaatttgtgaaatatttatccatccatgtaaatttaggcgatctctgtacaatttaatgacaaattataaagtaaatg

SEQ ID NO: 96166 - DNA, 32088 bp, Homo sapiens
ataaagcccctaaccccatactcctcctctgcttcaatttcctactggtgactcttatcaccaaggtaggtgataggtcaaggaggacaaggtagactgggtgatgcaggccttagaggtcagctgtggagtcacagaaaaggatacagagagtggaaagtggatctggaggggcaaatgaaaaatgtgcctgtaatcccagtacttgggaggctgacacagataatcactcgagctcaggagttcaagaccagcctgggcaacatgacaaaaccctgtttctggagaaaaaaaaaaaaagatgcgtgtctgtagtctcagccacacgggaggctgtgggagcttgaacccgggaggcagaggttgcaatgagctgagatcatgccactgccctacagcctgggcgacagagcaagatcatatctcacaaaagaaagaaaaaagaaaaatgcccaacataccagtgtttcccaaactttactccttcagatactattttcatgagtttaccatatcctatgtttactatacactcagctgtacttaatattttatgaaaacgtcctctttttttttaaactttgttaaatgtactactagtaacaggtactaataaatgtattaatggtaattaaggtaatatttcactaccttgaatagaagaaaaccataaaaaataaatctaataaaatcaagtttgctaaattttaaaacctaaaatttaacaataattataaatgataatgtatcttatgatgtccttcacaggctggtccctacctgcctctctagtctcccctcccctgccctgcccctgccccatgcttccatctctccatttcaagcatattggtttttggcccttcaaaaccagccatacttctacctaccacagtgcttttacataggttattcctttggtatatatcagtaagaggacatacccatgagtgctagggaacctgaagaatttaacaaatacagtgctatcagctaaaaacaagaagaattatgctttcctgaaaacattctagaattacacaggtattactcatgattttgtcattgatctggatatccaggttcttgtcctggcaccaaagtttaatcccaagatcttagatgatatatttaataaacgtgtgactcagtttctccatctataaaaacaattagctatcaagaacacgatagatacactaaatcaactacctaaactgttgaatgcaattcatggttgtatttgttatgtgagagcagaaaattacaatactttctttcagacacctacctttaccaaatccaacctcttatgtgcccaaccagatatcttagtcatgctacagttatttaaagctctcatttgttaaaaaaaaaaaaaattatctagcattcatatttacaaataaatgagataaatggggaacaagtatagccactttagatgctatttaacatccgttctgttttctttctataatagtgacctctactttccttggggaccttacttcctcccctactcccagacatgtgggaagagatagccccacccggcttcattcccagagccacagtgacaatcataaggtttaatcagaactaaggagatacagctggggacttctgcttacagttatgctctttctactggacttgaatctagggggatgtacttgatagcttcaatcatccattctcctcatttatctaccttattgtatgccctgaagaaaactggtctgcacaatataagttccctctagcttctggttgaatttagacaatgaagagtatgagcaagagcacagcctttgggtcatcttgcagggtctgagagtaaggccgacgtgaagggaaatagagccatggttggcagagggactgggtcctggccccattggctgactggctgattctggtcatgccaagactattatatacactgattctttagttgcatgagccaggacatttcctttttttttttcctcaaaacattttgagtttggggcttcaaacacctgaaacagagtcttaatgaaggtataactaaaaatatagctctgaagtgaagatgcatggatccctgatcctgaggactctaaatctgacctaaatacagttccagtctccctaaggccccatcctacagcagatcctgttttgagatttctctgagattctgtctctcttatacatgatttatagccttacaatattacaatattcaccatctttactcgccatgagtcagtttgttccttggagcaaagcgaatgtaatgaaacagttcccatcttacagatagggaaatggaggccaagatatatgaagagacttcatcaaaggcaaacctgaacgtggcaggcaggtctctggccaaggatctttccatgccagctccgtttctttatgtcccctttccctccttccctatgctttccccttcccctttgccctgaatttttgtggtccggttgctctaggagcctaggtcttgtcacattatctcagcacttggatgacatggttccagctgtcagagaaggaaaggcatggacttgtttttctctgagtttccttctatttctgtatgctcatttggccttcagcatgtgccaccctatgaaagtttgggggatgttttataatgttgcttaactttatttagcttcccaagtatttatgacttgccttcaagatgagagtgaatttagctggtgtccctgattcaccttggaaaaatctattgtgcctagcacagtatctggcttgcattagataatcagtaaatatccattgacaagattgactaaaagaatcttacattaggcaaaatgctggctaagctgctgtaacaaaattacagtggctccaacatgacagaagttgatttttctctcactccccagaggtgtgccggcagtccagggtgggcaggcggctctgttctatgaagtcatccaaggactccttgccctgctatcctctagagagtgtctttctcctcatggtcagagctggtttaccagtacattcacattctggcctaagcaaagggggaaagggaaagtgaagggaaagggaaagtgaaaggaaagaaggtaacttccttataaagatgtgattcaaatgtgtacatattacctctgcttgcttctcattggctaaatcactgtcacgtgctcgtgctagcttgcaagtgtgttgtgggaagtcagggaccccaaatggagggactgcctggagctccgacagaggaacataaattgtgaagatttcatggacacttatcggttcccaaataatacttttataatttcttatgcctgtctttactttaatctcttaatcctgttatcttcgtaagctgaggatatacgtcacctcaggaccactatgataactgtattaactgtacaaattgattgtaaaacgtgtgtttgaacaatatgaaatcagtgcaccttgaaaaagaacagaataacagcaatttttaggggacaagggaagacaaccataaggtctgattgcctgcagggtcattatattatattatatatatatatatatatatacacacacacacacatcttatatatatatatacacatcttatatatatatatacacattttatatatatatacacacattatatatacacacacattatatatatacacattatatatacacattatatatacacacattatatatatacacattttatatatatatacacattatatatatatatatatatataaaacattatatgtgtgtgtgtgtgtgtgtatatatatatgtccaagagtaatgaaaacatgttactgcagaaagactggtccaataatgttcataggagccttattcataattagccaaaaggtagaaacaaaccaaatgtccatcaacaggagaatatttaaacatgttgtgggatattcatactggaatactggaaggctactcagcaataaaaaggaatgaattcctgatacatgaaacaaccagggctgatttactcatttggcacagtaggcacagttctggggcctgtgaaaataaacttttaggtggaagaaaatgttttaggtgaaagaaattgtcatattcatctttatagcaacatagtcataagacataatttttgattatataaatagtttgtcatattcatctttatagcaacatagtcataagacataatttttgattatatagtgtgtgtacataaaatgaaggggctcatgaagtgcttagggcccatagaaatcataatgcaggcctacaaacaagaataaatactaaaatatgtgttaagccaaaaacctgggacacaaaagagtacatgctgtactcttaaatagaattctacaacaggcaaaactaatctatgttgatagtgaccagaaagtgattacctctggagtggggagagattgcaagaagggaatgaaggcactttcagggatggcagacatgctctatatcttgtttttggtggtggttatttaggtgtatatacaatctcctaaaatcatggaacagaacctttaggttctgtacattttattgtatattaattatgccacaattttaaacaaaggggaagaatagacagggtacaatgaataatttctgtgacagatttgataaatgaattactaggacggtgtttgctgacaaggtttaacattgcattcttgtagaaaacctttaggaactcaaagggaagagtccaggcactgtgacaggccagtggggaatgaaccacactgctctatattaatcaagcttttttattgcaaacaacagaatatatctggtaagcttatacagcacaggaatttatcagaagaataacaggaagtactgtattcacaacagtctctgaaaacaggcaggaatttaagacaagatcagaccatcagatggctggtggatcatatgatgccataatcctatacccttgccccaaccaacccacatatatctcaggccttcactgcatcttttcattactcctccaaaactgaaaacctatgtgtgagcctctggcttgctgagcctaggcaaagcctacatataataactcccatggagatggaagaggcaatgtgtttcattggcttctagatgggaggtggggcccccaaatgaccaatgttcccaacaaaacctgaacaatctgaaattattcagatttctgcttgtcattctaacctctgttcaggacttccaagatccaggacaggcccagtgtagatacctgtgtcccaaaccactgatctgggctaggaagactgaatcacaggtgtggaaggtcacccgggttcaaccatctaggtgatgaattaggccaggacctgggcaggtagaccatttattctggggagatatgatgcgagcttgaattacatgggagaaatatttgtaaggcagatgggataacaggacttgataagtctgtagtgtggaaaggctagaaaagaaaggaatcaaaggaatcctgatttctgacttgacagggtagaaggaggtgtgtgtgtgtgtgcgtgtgtgtgtgtatgtttatgtagggacagtgacacccaagagaggctaggaataggtttgttttattcctgtttggggtggttgggtaggcagggttaagtttttgacttggtgaatttgagatgatggccaatatacaattgacattccagctggggggaccattgaagatcaagtctggcaagtctactagctggcgcctgggtgagctgagcccagcaggtgagggaaaacgcgggaagagggtcttgcagattccaaacttaggaagggtcgcggctccgcgcacgtgctctcggggtcaccttccccgcgcctgtgagggtgccaggagttcgtccccaggtcccgcccctgtgggcggggcgaggcagcgtcgccgcgaggccacccggaagaccaagccgggtaggcgctgtctccgtcgcctccaacccccccggtccgaccagggaaggtgggatgctctgatggccgggcctgcggcgctgagcgcggcggcggcggctgctctggcggccgccctgctcctgctgcgtcgtgaggacccggggccgggggctggccccaggtaacccctccgcgtatgggaccgagctgggccaggtctcctggccgggccggggataccgtggggtatgcccagtgatgccagcagcttgtggcacctgggcgcaccctccagctcgggccccttccgatgggtctgctggctcagrtgcgggcgatggcyggggagccgcgccccgcacgtgactcagcactttccccagagcccggactgcggagaacaatatcctcctccctaacagataaacagcccttgttcctcgggataaggactggcagtcccctgacaccctaagaccggcatctgtcgatgttatttccccagcatggccgaaacagaagccctgtcgaagcttcgggaagacttcaggatgcagaataaatccgtctttattttgggcgccagcggagaaaccggcagagtgctcttaaaggaaatcctggagcagggcctgttttccaaagtcacgctcattggccggaggaagctcaccttcgacgaggaagcttataaaaatgtggtgggtatttcagctgggactcaaatggacccccaggattctgcgaggtgaacatatttcatgcctaaaggctgaatactgccctgccagtggtgggggtagtgagaggccatcaaaacttggccaagattggtctgtgagagtccctcccagaagtctgactcctggattgtagcccaggtgtgcctccctcccgctcattgtgtggtcttgggcaaagcccttctctccatctgcaaccctataaagctgggtctgggttgtaatgggggtgggggctggtgagacagaagagcactgttttcagggtcatacaagctgtcttctagaggcagccctggtgaccttgagaattttctcagccactttgctgattttgtcaacctgcgcacttcacactaatattgtcagggattctgaaactgctttgcagagtgagataggtctatggcagtgaaaggtgggattattcacttacaagaatttgccctgcctgacttcccaggcttgtgtctgtaaatcggatattcccttcactctaagttaaaggtttttttttttttttctgagacggagtctcactctgtcccccaggctggagtgcagtggcacgatctcggctcagtgcaacctctgcctttcaggttcaagcgattcttctgcctcagcctcccgagtaactggaactacaggcgtgcgtcaccactcctggctaacttttgtatttttagtagagacgagacaaggtttcaccatgttggccaggctggtctcgaactcatgacctcagatgatgctcccgcttcagcctcccaaagtgctgcgattacaggcgtgagccaccgcgcccagcctaagttacacttttatgattataggaatgatataccagacttctgtcttgtcatgaccccctaaatatcagaagcctgagtttcttggagattctgttctttatttaaagggaattatctgtgaactgcaacaaattaacatagtgtgatctcaagacaccacagctacagaatttggccccacaggtttcatagaaagaacatttcaaataacaagccatcttgcagataaatgttcttgattctcgcaggtctgtgttcaggtcatggtgtgaatgcctttggtccatcaagtcttgtttatttaaaacagacatctttcctcaggctgaggcagatgtgttctcaccggtttcatgggctgtgtcagatattcatggtaattagaagctgaaactgaaggctgggcgtggtggctcatgcctgtaatcccagcgctttgggagtccgaggcaggggatctcttgaggtcaagagttccagaccagcctggccaacatggtgaaaccctgtctctactaaaaatacagaaattagctgagcgtggtggtgcacgcctgtaatctcagctactcaggaggcggaggtgcgagaatcacttgaacccaggagatggaggttgcagtgagcagaaattgtgccactgcactccagcctgggtgacagagcgagactctgtctcaaaaaaaaaaaaaaaaaaagaaaagaaacaaattgaaatctgtgttttgagtgtcgagttttggtggcacatctgtttgactaggtactttgtgaaaccctatttttctttttcttttcttttcttttcttttttttttttttttttttgagatggagtctcactctgtcgcccagtctggagtgcagtggtgcgatctcagctcactgcaagctccgcttcctgggttcacgccattctcctgcctcagcctcccgagtagctgcaactacaggtgcctaccaccacaaccggctaattttttttttgcatttttagtagagacggggtttcaccatgttagccaggatggtctcgatctcctgacctcgtgatccacccacctcagcctcccaaagtgctgggattaacagtgaaaccctatttttctttagtgtcataggcagtgccagaaaaattcttttcagagttgacagtaaggatggaaaccaacattttatcggagttcttggatgataggaatttatcatgctttcttttttaagttatacagcaaactgataaggttagatggaggttcgtaaacttctgtgtgcatgagaattaaggtgggtgcttgttaaaagtgcagattctgattcagaactattggtgtgggatgtaggaatatgcctttttattaagcactccctgactaattataatgcaaatggttcatggattggactgaaggaaagattatcacccccattttacagctgaaaaaaaaaagctgtagtgtatgatgaataatttgcccgtaactacatgcctagtgagtgtagcaagcccaagatttgcagctaggtcttctttaagatgccaaacgccatctcttgccctcacatcatacctcagtggtctccttcctggttagctacacacaggtcttttatttttccagagagagattataatcgaacctgacttcagaaatctggatcacccctagtccagttatatagactgtggacatatgtgtgtgttgttgattttcaactgaggttcattgctttttggttggagaaaaggaatttgtaaaatttgatgttaagtggacaggcctgtcmgtaatgttctgtaacttagtctttaaatctagagggggtttttggtctgttgtttaaataacatgaaactacatacaactgtgtccttkcctagaatcaagaagtggtggactttgaaaagttggatgactacgcctctgcctttcaaggtcatgatkttggattctgttgcctgggtaccaccagagggaaagctggggcggtaaggaaggcatatgctcttttccctttttgctggccagtaatatcaaggattcttttcttgctcactctttttctttgtgcctgttgcaatgcttaaatgtgaataagcctttattgtttaagattctatatgctgcactaacctttggtatccttttaatagtactgataagttcgtctttcaaagtaatccttgagttcaggccccagtgctggagacgtcgtaaatatttacatgattttgcctattgtgattatcgctatcactacatcccctgactaagggaaaccatgatgtctgagtaaaactaattggtttatgctgttaacaatcagctgtttttccccttaataaatgtttgaaatttgaaatgttctgtctcacttgagtgatttgcttcaacttattttcatgtcaagctttaaacttctggaatagaacatcagaacacaggcacgattcaaccagcctccagcgatgactcagccttcagcgatgattcaaccccactaatgattcagtctttactgacgcaaaagtcttttaacgcacattttattttctttttaatggtgttctaaattgagtcagctcctgtacagaagtcatagtttactacatagttagaaatcagagtttactacctggattctgggcaaatgttagtgcgggtacatcttatttaatttatactttgactatagtttattcctctggcagaatttacatgctggagctgaaaaaacctgcatgttctgcatatgtatcccagaacttaaagtaaaatttaaaaatatttaataataaatacataaataaaacagaagaaagtgaaaaaagtaaataaataaataaagccgaggcacagtggttcatgcctgtaatcccaggaaaacaagaaaaaagaaaaaatatatatatatatgactatgactctgccatgggaattctccttaggtttataagccagaccccttcacctgaaacattaagggagcatatagtgaagaactattcatttataccaaccgagtagttagattcagatgtatttctytgggcctccttgtgatgcaaagagtaattctatgtatgctttcaatcaagatgtatttccataccttctgcagttctgcctatctgtcctggaacacagctgggattggagctctgtgatgggaactatggattatagagaagtttgactttcccaggaattggcacattatctctcctagaaagggtcatgttcctgcttaacagtgggtgcagtcttttctgtcccaggcacagtcacaagtggtgtgccctccaaaagcattgaaaaacttttgttccaggacactgcaggtttgtctcaagtgccaacctggttttggtggtgagtcagcaaaacaaaatgctgcattaggcatagaagggttgattttcatgacataaggcaaatctcattatagggtgtgccagggaaaagtctaaactgctttttgtgttcaaaatgggtaatgcaattttaatcagaggaattgtgtgtctttactatccagaattttcttttttaatggggttggttcttcacgtctcaggctattcaataccttttgttctcctttaaaatcaatttggaaagataaaagtaattaactagtaagcaagaatagactaatgagcctagactattcacctagcttagaaatgaattaggacttaaatgatttaagaggttagtggtggaaagcaagctgacacttataccagaaaagtgttttgtttgttttgggggctttaaaaaaaaaactaatttgggctgtgtacaatataaagttgggaggttgataactttagccaatatgaaagaggtgacagttcatatgtggctaagtaacgatagtgttttaagtggaggttgtggatttccaagcttatcccagctggtgttctgggtcagcagccctctctgtagaaaaaagttcgttgggtggtttatcatatgagtactacaaagctagtggcaaaactagtacgcttcactagggattttgtaactggaacacctcatatattgccttagcagtctgtgtttccagcagagaaacttcaagaaattcagcgtttttgtctcagtattgagatcctctgtgtaggtggcttatttccatgtgatgttcagtgtattagtttgctagggctgccataacccaagtagcttgaacaacagaaacgtattgtctcacagttctggaggctagaagtctgagatccaggtctcagcaggctggtcagtgctctgaggctgagcccttgagtttccaggccctctccttgtcttgtagatggcagccttctctttgtgtctctttacgtggtattttccctgaatacctgtgcctatatccacatttcccctttttataagaccactagtcatactggattagggaccaccctatttagtatgatctcaactaattacatctgcaatgaacttatttccaaataaggtcatattctgaggtaatgggggttaggagttcaacatacgcattttggggggatgtaatccaacccacaaaattcagtctactcaggtttctaytgacactggttctaggaaaaggtctattagctttcctcagctgtttggaagactatttcctttaacagtagctgggcagatgctaatcttccttttcatattcacagaacacagttgttcagtcaatgcactggctccctgacttggccctgatccagatctactgcatcagcatctctgaatttggaagcttggaatctgtatttttagcaggctccttgggagatcctgatgcagtcarccctgtccttcttgttgaacctactttcaagaggcattggggtgtattaattcycctcacttgctggttttctgggtactgtggtcctggataacctttgccttgctttagtgagtaacttgtttgctagtgaagattgaaatagcctttgaaaaccagatctgtattgtcctggagtgaagcacaaaaacttagagatgccagtgagaatagttcatttccccttatttgtatcaaaagagggatttgattagtgaattcaaggtggttcgatgtggtttcaccttttcatttgtttcctcacctggtcgtagtaggctccagaagtccaggttcttgttttctgttgagtggatgatgtcattaatgtgattagtgtggccactgtgacatttattaggcatctcatggcccatctcattagaaccttatggcttctgattctaatgatctgctcttctaattcaaaggtttgcaatacagcctgccacctgtttttgtacaccctgtgagctaagaatgtctttatgtatatattttttttttgagacggagtctcgctcagttgcccaggctagagtgcagtggcgcaatctcggctcactgcaagctccgcctcctgggttcacgccattctcctgcctcagcctcccaagtagctgggactacaggtgcccaccaccatgcccagctaattttttgtatttttagtagagatggggttttaccgtgttagccaggatggtctcgatctcctgacctcgtgatctgcccgtcttggcctcccaaagtgctgggattacaggcgtgagccaccgcacccggcctatatttttaaatggttaaaaaattcaaaagaataatgtcataccatgtgaaaatataaaaacttcaaattttagtctttatacataaagtggtattgggacacagccatgcttattactttatgtattatctgtggctgcttttgtgctattaacataatggtagagctatatagttgcaacagaggcctgcaaagctaaaaatagttactgtctgatcctttacaggaaaagtttgcccacccttgttctaatctctgttgttttatttgatgtctaggagggggcttgtgaagtggcgaggtcctagctggttcaagggacccagatcacaggccctgtttggttgccaagtagctatggagcctggagtttgctggttagcttttggaggccactacctccttgtctgtcagaaggaggtgaccagtgaacccaccttcctactgcaaaattcttaaacatttttctgtttttttgagacagagtctcattccatcgcccaggctggagtgcagttgtgtgatttcggctcactgcaggagtgcgatttcggtcactgcagcctccacctacccagctcaagcaatcctcccacctcagcctcccaagtagctgggaccacaggcatgcgccaccatggctggctaatttttgtatttttttttgtagagacagggttttgccatgcttcccacccaggctggtcttgaactcctgggttcaagtgatctgcttgcctcggcctcccaaagtgctgggattaccatgagccatcgcacccggcctgaaaaattctttgactctatgaaacacagaagaaagaatatccaattggaaaactttttcaagaacatatagattgacccaggaatcctcagtatctgcttgattttatttatctatccagaacttctctaaccaagatctttcccctaccattgaacatcaaatatggagatgccctccaggacacaaacaaaaggtgcctcagattataccatttggtgtttgtcagcatctttgttttctagtctaatttatagggttggattgaaagggagtgaaggagaaagaacctgaagcagaaatagggctgaatgggacctttacagaatgatagacccacccttcttggaaaaagatccccatgatttacttttttataaattaattaattttttagagacagggtctcactgtgttgccaaggctagactcaaattcctgggatcaagcgatcttcctgcttcagcctcctgagtagctgggaccacagaccaccgtgcctgaccccatgaccttcttgagtcgtttagacgtgctaacttgtcctatcagtcagcactgaaatactataccttgttaggatgagttgttctgaagccagaatgttgtttttagttttcaggcactggtaaagaagattagaagaaatacttagtagctttggattttagtaagacttaagagtcgttggagaatttgctgcctttgatgttgtggagcctatgaggatatctctactgagtgtagtatactgtgtttattctttttgagagggtgctgggaaaggactttatagtgggaacttatttaattaattcctttttctagaagggactcagattcctagcttagagcaggacacattggctatggaatcataaagacagaatgacatgtggacttaatactctcagaagagatgtctgtccacatggttagggaaactaagtacagtttttctaaaaattgtgtttctgagatatgaaatagcttgctttagttagtttttctgttgtttttttaatcgagctattggagaacaataaagggcatgaataagattttcgagatcgctcctttcatctgtaaatagaatcttcctcactccagagaaaattggtgtgtgatacctcctagtcagtcatcaggacccatgcttcagtttgatttttaagtctttgaaagctgttgacccttttgcttttgagtttcattcaccagctaaaaggccacgccatcagggtgacggaagtgaaattcaaaatttagtgggcttggaaaaacgcgtatttataatgagcttgaaggctcagaggatttgtgaaatcgttttggattaacagccattgattgctaataaaacaatatttagctttgtccagagaacagcaatggagaaaggtatgggcaccttgtcaacaggccccattgagcagggatgatgggctaagtgtgggggtctctgcagcagcgtgggtgctcgtccttcaaggagcggttgtcagtcgttagcgaggcgggtgaaaggaaggaygccaaagtctgatggccggggtggtattgatgtgccttcgctgactaatcagattgaaaaagtcccatggtatttatgtcactttaattttcatcaaacaattggagacgacagcactctattaaggagaggttgatccagaactaaagccaaataaattagggtctcagtttaatcaaattatccttttactggctctggattaagtgagagagacagcgtcggtcaggagacttgtgattggctgaatctttcccttatttttaaagaaacggatgaaagaaaaagtattttaacagactactataataatccttccaatcaatcttgctaaaacaacaacaamaaaaaaactgaatttatttcactagtcaactgtgtcattttgttgtgaataactaacctgtcattaaaatcagagttctgataaactggcatgaggggaagaaacagatgtggaagaaaaatttagtgtcttagaatttttctatgtagttttgggctgtttctcttggcacactttcagcacatctaaagtctccatttggagaatggctctgagggtaatcacttctctcaggatgtgctgagtacttaaattggtttgctttacactaattttaaaagcaactgcatgaatttgagtcggtatatagacagcttggcaagtccgttgttcaggactgagtgtcaaagtatacaacaaaaagtatacaaaaggagatggtgatgactcgtgagtaaagaggtaagtttatattacccacaaactaaggtagaaaaagtaaggcagaaaaataacactgtcctccaggtggtggatatagttaaaaatgtacttgtgagtgatgggaaaggaggatgaggaaggcttttacagtaatggtaatgttctatttcttgatcttggaactggtggcagagcatgttcagtttatgaaaatttattgagctctatacttatgtttacttttatgatacacttccatacaaagttaaaaaatctgcatgggcgtattgttttaaaattgaattctgtattagtttcctattgctgctttaataaattcctcaaatttagcagcttaagacaacacaaatttatcatcttagaagtctgacacgggtttacctgagataaaatcaaggtgttgacagagctgcattcctttctgggaggctgtaggacagaaaccatttccatacgtttttcagcttctagaggccacccccattccttggcctgtggtccccttaccatccttaaggccagcaatgtggtagctgagcccttcttaggttgcattactccagcctgctcttctgcctcgttcttttacttttaagggcccttgtgattacattgggcccacatggataattcaaactaatctctctgtttcaaggccagctgattagcaccctaattctaaacactgaatttctaaaacactgaatttcccttccacatctatttcttcccctcatgccagttcactagaactctgattttaataatgtgtttgttacaacaaaatgacacagttgactggtgaaataaattcagtttttttgttgttgttgttttagcatgattcatcttgcttctgcctaaataccatctgtgatggaattcccccttgtcatgtaacatgacatattcacaaagattaggacgtgggcatctttgagggaccattattctgcctaccacaatcacggattagtcattttcattagcgagagagggtgggggataaaaaaggaacatgggtacagtgaaaagagcactgctcagagtccagaatctgcactctgctctcggctctcccacttcccagctaacagttcacccgcccactggaccttggttcctgtctatatcatgaggggactggatgtgatatttcctaaggtaccttctaacattctgtgaaagatacacatcgccctaccaaatagaacatttagaatcagtaactactgaggagcaaattttttaattaaaaaaaaaaatcaggcygggcgcggtggctcacacctgtaatcccagcactttggaaggccaaggtgggcgggtcatctgaggtcaggagttcaagaccagcctsgctaacgtggtgaaaccctgtctctactaaaatacaaaaattagccggacatggtgacatgtgtctataatcccagctacttgggaggctgaggcaggagaatcacttgaactcaggaggcagaggttgtggtgagtggagaccacgccactgccctccagcctgggcaacagagcaagactgtctcaatcaatcaatcactggggcagtagtccagtcttcagatttggaattcctactactctaagacctcattctgtaattgtgactacctataaagttcagcttcaatagactttagacttgtcttcagctgtcttgggtttgaagatgccagaatttatggtggtctcaagagactgttactccttggaattcccttttctgggtaaaggtgcatgcttttcagttaggccctggaagtgagtctatattctgttatttgtgtcattctcttccctcccccttttattgccacttagttctgtttgtttctgactggatttaccttttctctgctttcattggcgttttgttcattcatttttggagcatctaccatatgctggacatgtgctgatgctgagagatgaattaagaaaaaagacccagccactgccttcactggactgaatctagattgggtgtctccaaacacttttgaytagagacccattaataaaaacgtttgaggatgcattctttactaatgtgtgaggtacattgtagagcatacacaaaaattgggaattaaatagactttgttctcttagtgcctggggagtgtcctcacccrtactcggagaccctaccacattagaattgacacagaaaacaggagtgtaaagttgtgaagttattaagacaaaaaaaaaaagtctggcttaaaagtagtttctcagcctgatcttactgttccctttgttctttgcagatttgtttggtgtctgtgtttcaatgtcattgtccttgtttccttattgcagtccagccttgctgctaaagctggtgtgcctatccagaggaccagacctggagcctttcccagggtctaagcctgactttcatgtattgcttggacacattttatttagatctccatccttccaggcctcccagcctgctacccaagccaagtagtaatctttaagatgaacttgctgctttttggaaataactcatgtccttttcccccttaggagggatttgttcgtgttgaccgagattatgtgctgaagtctgcagagctggcaaaagctggagggtgcaaacatttcaacttgctatcctctaaaggagctgataaatcaagcaattttttatatctacaagttaaggtttgtgcaagtttctgtttttcatacactttggagaaccctagctatttggcagtactaaagaatataaaatattatataatacaaaaaccatcaaatgcatcatattatgcatttgtatggctaygggactgcaggaatatatttagtaaacaggaatgattggaaaggtaatttccaatgtcttcctctctattaattatccagcaacaaatggaatgagatatggcatctccagccttgactgtcagcatggcagcttagcattggaagagacttggaggcagtgattcttaaacttttccgtcagtctccctaatgactgagcggaaagaagagcttttatttgtgtagagatttggagaaatctatcctgaagcagtattctagttacagactcaactttcttttctttttttttttttttgagacaggttcccaggctggagtgcagtggcatgatcttggctcgctgcagcctctgccccgccaagtaactgggactagaggcatgagccaccatgcctggctaatttttgtatttttggtagagatggggttttgccatgttgcccaggctggtctcaaactcctgagttcaaatgatcagcccatctcagcctcccaaagtgctgggattacaggtgtgagccactgcgtctggcctcaactttcttaaaagtcttaacgttttatcttttaaaaatttatgcacattttgctattcttagtactatacatatccctgtttattttaatttaaaaggtttctattaacttacctttcagttaaattgatgctgttggaagataggcatggctttgtctttgtgtgcctccctttgcaccccaggtgcccacagtttaagcagcagagccacagaggtcattcagccatagacttttcctatgtgaagtccttttacagaagttcatctcctttctgcttaaatatctccagcactacagagattactatctcgttagccaactttttctattttgggtcagatctacttgtccaaaagtctttaccttgaagtgaaatttattgttatgtaaatacaaattgttatcagttctgccttttaaaataacaaaaatacgtccagtctttcttttgcattgtagtttttaagacatttggagattatgacccccttaattgtatgtttcccaggcataacacctttaaatccttgcaccattctttatgggttcctgtgtctagctccttcatgactgcatcactttgctaagggtgaactttgcagtgatattatactggaactgcactgggagtactattcatgctccgaacactatgttttttttaaaaaataggatataagattgttactattttaccaaacatccttattatgttgttggctcatgatcagcctgtaatattaaaaatttccagatttttttcacatggcttatagctgagccatatctcacctatcctaaaatagtattttgaaccagatgaagatcagtgagccaccaatgaaattacatgaagaatggaaaagtttccacttaattgtcagagtttagaacaattcttaaaaggaaaaaatctgttttcctttttttttagagtcaaagtcttgctctgtcacccaggttgaagtgcagtggtgcggtcacagctcactacaacctcagattcctgggctcaagcaatctccagcctcaacctcctgagcagctgggactacaggcatgagggatcaggcccaacttgttttttaaaacactgacacatgtgggttctgagaaaggttatcaaataggatttttgctctcattagcaagatcaacatttataccttttaggaaagaaaatatacataagatatttcctcattgttaaagataaaggcgttactactgactcactgggttataataatgatttaaccagatttttaaaaaaatagctaacactaaatgagccaggcagtattctgagggcttttatgtgcatttgcgtggaaacaggtactgtgatattaagaccaccagctgttggctgggcacrgtggctcacgcctgtaattctagcactttgggaggccgaggtgggaagatcacttgaggctgggagtttgaaaccagcctgggaaacgtggcaaaaccctgtctgtactaaaaatacaaaaattaactggcacagtggtgtatgcctgtaatcccagctactcgggaggctgaggcaggagaattgcatgaacccgggaagcagaggctgcagtgagccaagatcacatcactgcactccagcttggggacagagtgagactctgtctcaaaaacaaaacaaaacaaaacaaacaacaacaacaacaacaacaaaaacaccagctgttaagcggcaaagctagagcttgaacccaggctgattccaaggcctatgccactagctattaagtaatgaatagcctttgtcactaatacatgcaaaagggacccagcagagattggaccgtgacagagcctcagcaaatattaaggccaatacaacggaaagacacttstgatttcactgcaattggcctgcattacctgcagcctgggattatgaattagattaataaaggacagaaatgacaaccaaatgatccaacccagaatgacgctgaacaatatataattgcttttacaatttggaaagattatctttccaaaataatccttcaactactgtgtgtaacattcctagtatttattgcytattttctcagcctccatgtgtgtatgaactcccccgccccacccaattttagaaactcctttattgtttaggaacatttattctactcaatgaagtttcaattgcattcattcatggtgggccagctctgggggcttggatcaatcatgtgctttatgggcattctgctggtgccgtggggagacgtgtcaggatgtggagcccagagtactggatgggcctcatgtcctctgttctcagggtttataagctttggtttcctcatctattcagggtgaaggtatactttccagacatgtgacattttattattgggtatcatccttgacctcaaggagtttataatctgcttgtattgagggatcctcaaagacacccccaagtttggtaattcactagaaggtttcataggactcagcatatagtcatactcacagctacaacttatcgcattgaaaggatatagagcaaaatcagcaaagggaaaaggtgtgtcgggtgaagtctggaggaaagtaggtacaagcttccaagaggcctctccccatagagcttgcacaggatgtgcttaatgtctccagcgatgaacgttttctgccagagaaactcatctgagcctaggaatgcagggtttttatgggagccagttacataggcacattggcctagccaaattgcagccctccagaagaaaggcaagttttcagcataaaccacattgtttgtacagacagtttaggcatagtacatgacccttatcagatagggaatggtgggaacacaccgaaaatccaaggttgcaagcacaagccaggggccaaacttgcaacaggcctttctaaggatagcagtctcagcctgctatggtatctcttttatgcacactgctaatagagacaaaacaaatcttttaaaaagctaagaaatgggccgggcgcggtggctcacgcctgtaatcccagcgctttgggaggccgaggcgggcggatcacgaggtcaggagattgagaccatcctggctaacacggtgaaaccccgtctctactaaaaatacaaaaaattagccgggcgtgatggcaggtgcctgtagtcccagctgctcgggaggctgaggcaggagaacggcatgaacccgggaggcggagcttgcagtgagctgagattgcgccactgcactccagcctgggcgacagagtgagactccatctcaaaaaaaaaaaaaaaaaaaaaagctaagaaatgtgtgtacacataaaatcttgtgtatgactgttcatagcagcattatttataatggccaaagagtgggaacaacctagatagccatcgactgatgaatagatgaataaaatgtgatatattcatgcaatagaatattattcagctataaaaagaaatgatacatactacaacatgggtgaaccttgaaaatattatgctaagtgtgaggagacagtcacaaaagaccacgaattatatgatttcatttatatgaaatgtccagaataggcaaatctatagagatagaaggtacattagtggttgactaggtccccagagggtagggtacgaggagtgactgctaatgatatgggatttcttttcagggtgatgaaatattttaaaacttagatcgtgatgaaggttacagagttctgtgtatatactaaaaaccacctattaaaaaaaaagaacggccaagcgcggtggctctcgcctgtaatcccagcactttgggaggctgaggcgggtggatcacttgaggtcaggagttcgagaccagcctggtcaacatggtgacaaccccatcactactaaaaatacaaaaattagccaggcataatggcggatgcctgtaatcccagctacttgggaggctgaggcaggagaattgcttgaacctgggaggtggaagttgcagtgagccaagatcatgcccttgcactccagcctaggtgacatggtgagactctatcacacacaaaaaatacataaataaataaataattaaaattaaaaaawttttaaaaagaaaaagatatttaaaaatagctacttaaatgtctgtgatgagacaggttaagtgccaattgagtggtacacacaggccaagaaggaggcgtgcatgaccgtgtggtagttcacaggcctttggaagtgcctgtgggctgagctcctcaggcattttgtttccagagatgcctgccatgaaaatgcatgctttatttaacaaattagatttaaagcatcatctagatgtaatctgtcttaaaattttgtgaggtttaagaagtgagtaatatagtgggtctatggttttctgacccactggaactacctataaaccaaaaaaacgttagtgtctgctagcatgcaacatgaattctggactaaatagaggatattcttttatgattgtactaacgtatgacttaccctctctgaatctgttttaatatcaataaagtgagaggactgactatgcagccattcactcatttagtggatcttttaaatgaaagactacacatcaggattaaatgatctcttccttaatttcccagactccttggaacctaaaattctagataaggatattttgagtattgagatctgcaaaagcagrttatctcaaaaccacaaattattctctcttaaacttcacacaggtgagctggtcgcgattaaatactgaaaatgtgttttttcttaatagggagaagtagaagccaaggttgaagaattaaaatttgatcgttactctgtatttaggcctgggtaagtataatatttatactgaatgagagtatgccactgwtggttaayccctagatactaatttttcatttggaaaggctgacagctgaaatatctaagatatgaaagacattggctasaggtagattgcttctctgaaggacacacctttttgcttagaaagaaagggtagatggtggggcctgcttcagaatagtctggaacttcctggacagcatttgctgccttcttaaatcctcttcatgtgccaaataaaaccttacgtctactgtattagtctgcttgggttgccataacagaataccacacagattgggtgtcttaaacaacagaaattttttttcacgcagtctggagattggaagtccaagatcaaggtgccctcagggttggtgtccggtgaggcctcttttcctggctggcagacagaccaccttctggcagtgtcctcacatggcctttcttcttwgtgtatgcagacagagagagacctctgatgtctcttcctcttatgaggaccccagtcccatcacactagtcctattccatccttaagacctcattaaacttaattacttcccttaatgccttatcttcaaatatggggattagggcttcaacattagaatattgaggggatacagttttgtccgtaatgcccactgtggtctcagtgcaatttaccacctcttcctctgcttttctttctttyttttttttttttattttagagttctgttatgtgataggcaagaatctcgcccaggtgaatggctggttagaaagytctttggctccttaccagactcttgggccagkgggcattctgtgcctgtggtgaccgtggttagagcaatgctgaacaatgtggtgagaccaagagacaagcagatggaactgctggagaacaagsccatccatgacctggggaaagcgcatggctctctcaagccatgaccacaytggagaaatggtttttattgtcaaccttaacacccatcaccaaatcggtaatttcagggtctaaaaaaagtcagcatgttttaactttgttgttttactatcctcaggcatccattccaatcaagaaatgatggtgctctgcatcagtggttcagagcctggttatacatatagatcactcagggagctttggaaaaataaagatttgtcagccctatctcaaacttgaatcaaaatttctggggtgtgggcacaataatctgtaattttctttgtttatacttcccctgatgccactggttccgatgccactggctggggggcctgctttgaaatgcttgtctgcagagtcacagcagccatgaaaaccttatgaccgtgcaaatgagctctgctctaaaattgttgacattcatgtctctgagttacaaaagtgctaattcactacatgtaattgtgtaagtaaacattgtgcctttactacttctttatgtaatagaagttatatacctaagcttatataatacatggggaggattaaataaaggaataaagatgaatggacaactcctgggtgcctcttagattgcttgaaaatgcccatgtagtgtgatatgcagcatttcagcctatggggtgatataatagcagctaatatttaccaaatgcttgctaagtaccagtctttacatgtgttatctgtgctttaaccctcttataaacgatctttataaagtgatactatcatgatcttcatgtcttagatggggaaatgaggctcactgtggttaagtgccttgctcaagagtccaaatctgaagaactgaagcaaagaaatggcagagtcaggattctaacccaggtctgcctgatcccatagatcccatagatcgtgtttttaagcaccctgcaaaagcattctgttcccgtatatttccaggtagttccagttgattgttactacatgttgtggatgaacaaaattgaaatatttgggtttctcctttgttctagtgattaattactaaatgttcacatagccagtaaaattctatgccaccaaactttaaagtgctcatgctgctgcactttaaaaattaaggcaaaggaagatgcagaaggaagggtcaaagccaagaggaacatacattgctaatttccatcatagaacaaaagatgttaatgtaacttgtcttaacgtctgcaccagggaagcaaagtgattcgagggactcagtcaattcttccaaggcctactgtatgccaagtacatttcaagcttcagtatacactggaggataaaggccattctccttaatttggagtgtatatccttagaagggagaagacattcccagtgtcagtcacccaaaaaagaggcatattttagggcagggtgggatattgaaatgtgagctttaaaaggaaatgaaatatcttccttctgccaggtggggttccctgggagttggactttgaagagcctaagtgtgttgttttgatggtgaaaaagcatgggccgaggatatgttgaggcctctgggctctgaaagcagctaaacccagtggcctgttttaagttattctccttatattatttccttactcacaaaccttcgagcaggtttcattcaacatgttattctggtctcagtagtgatgtgggataatgaggaagggtctgtgttcacctttggagtagagagaaaagcagccctctcttgagctctgcattgtggtgagatatgaacttactaaggaacaagactctggcccaatcactcctccacaatgggtgttaacttgttttattgtcaacactgaatggactgggtgttccatttagtactaagggattcaggaagttttccaccaaatgttacacagacagaaaaagtttatgttggaaggatgaagggaaaagttggatgggcccaggtaatcaagtgttcattaattcattcagcaaatgcttattcagtgcctttcatgtgccactgagcacacaggcactggggatgcatccatgaacgatgactccaactcaagagagccagcagctattctggcaatgtcctaggatgtaagaaagcttcaaaattaatatgtgggccgggtgcggtcaatcacgcctgtaatctcaggactttgggaagccgaggtgggcagatcacttgaggtcaggagttcaagaccagtctgaccaacatggtgaaaccctgtcactactaaaaatataaaaattagccaggcatggtggtgagcacctataatcccagctacttgggaggctgaggcaggagaatcgcttgaacctgggaggtggaggttgcagtgggacaagatcgcaccactgcactccagcctgggcaaccgagcgagactctgtctcaaagaaaaacaaaaacaaaaactaatatttaatggattctgtcctccaggaatttacaattaagggagaaaagtacatttagaagtacatttagcaataatataaggcatcatttttattcagtgaatacattcagtatctattaatactatgggccaggccacatattatgtgccagagaaatgaaagtaaagagacatggcccttacttacccttattgttcagtgctgtggggtatcaccaaaaaagaaaaaaaaatcaagtaagcaaatggtgggtgctaagaaactaacaggatactcctgaaataatggtggaaactattttagaaatggcctgaggaaagtgtttctggttgagaccaaagggacctacccatgtgtagaacattcaatgattagcagtaaataaaaggcttaagggtgggacccaaggtgaagggttccattggaaagaggcaggattatgcagggcctgataggccaattagataaactctgctagagcctggggcactccctcctaagcaagaattctgggccgggcggtggctcgccggcaggtggatcacctgaggtcaggagttccagaccagcctgaccaacatggagaaaccctgtctctactaaaaatccaaaatcagccggacgtggtggcgcatgcctgtaatcccagctactcgggaggctgaggcaagagaatcgcttgaacccggaaggtggaggttgcggtgagcctgagatcgtgccattgcactccagcctgggcaacaagagcgaaactccgtctcaaaaatcaaacaaaaaaaagttctatggtttgaagagatataaggaaaggaagaaagggacgtggcatgaggcaggcaggggaacatttgtgttcttccccacacagcagccagattgttactttctcaacacatctgagagcatcactccctggcttaaatagttatgtctgagcactttacatgtattaactcgttttatccttactgtagttctgaagttagtccaggttttttgttttttgttttttgtttttaagatggagtcttgctctgttgcccaggctggagtacggtggcacaatctcggctcactacaagctccgcctcccgggctcaagcaattctcctgcctcagcctcccaagtagctgggattgcaggcgcgtgccaccacacctggttaatttttgtatttttagtagggacagggtttcaccatgttggccaggctggtctccaactcctgacctcaggtgatccgcccgcctcagcctcccaaagtgctggtactatagacgtgagccaccgtgccctgcccaagtgcagttattatccttgttttgtatttgatgaaactgaggcagagagaggtcgagtaacttgcccaagatcacagttacaaagtgacgtgggtaggattcaaacccagcaggctgcctctagagttcacgttctcacttaaccaaagattaaaatccgtcttggggggtttgacacctatctgtccctgcagtagacccaccctggcccatgcagttcgttccctctcgccagctgcaccccctccaggacctgggagcccagaaaccagccgagcctccagcgtttggcctcctccgccaccagagggcgtcatgggccgatcgcccctccgctaaccgctcatcccaggaaaaaggggcgcacagaggacaggatgccaaccccaaaaccgcagcgacgtctctctgccttggggctcacagcagcgggccgcgacctcccactaacgcctgccgcaacccaaggaggagacaaaagtcatcttccgggctgcaacattaaccgtcatcagcgcgcctcttcagcgcgcactgcgccaaccctgcggcaggaggaggcggagcccccgctctcgccccgcccccacctcacgtgacccgcacggcgcctcgaggccggaagcgattgcgagccagcgcgcgcgcttcggcgttcccggcggtctgcgaagtttccggagcccgggtcccgccgcgggttcgcgcttgtgctcgcgctcgttcctggagtcggcggccgctgcgcgcgctcgttgcccaacccggtccccgcccccagacacgccgggctctcggggcaccacagccatgtgctcgttagcgtcaggcgctaccggtgggtaccctggcccctcagcacccggctcgtccagccccaggccgcgccgctgtggggccggtggaagaccctccgggacacgggcccgggcagggtggggggctcgcagggatcatgaaggaggtgctgagtgagggccgcgggcgaacggggcggaggagagcccatcgtcacctgctcctcgagcccccgggccgcaccggtgtccgaggccgatctgattgttgtgtgtgtgtgttaggcggccggggcgctgtggagaatgaggaggacctgccagaactgtcggacagcggggacgaggccgcctgggaggatgaggacgatgcagatctcccccacggcaagcagcagaccccctgcctgttctgtaacaggttcgtccgcctcagcgcctggcctctgccctagggtgcccgggcgcgtggggtctgtgtgcccaggaacgccttcgggcgggaggcaagccagagtggcctgtctttgaattctggaaccactggtctggggtgagggcttgtggagaaggaggaccctcggtagtagagagggggaaccgtgaactggaaggccggttgtactgcaagcttttgactggtagtgcattgaatctgtggttcccaaatcttgtcacttgagacgctgaaaacaaaatgatactgaactctgcacctgaatccttccaagtcagggatggggtctaagaatattctgtttttatgaggacaagatcggaagtaacagtgaagttactaacgagttactactaacgagtaacatatttggcagccaccctgaactagataatccctacggagccttccggctttaccatgctaattctttgaccagtacagagcttctcaggtgaaacatttcttttttatttgagcggtttccatagtctaagaaggaagttcaccttacttaagtaggacttttcacttaaggaaaaagactgtagtatcaataatttgctcaaggtcacaaagctgtggtgtgcttatttccaaactcacattcttgccacttaaaattctgcctgttagtcttgggaagctttggctcctgtcctaggcaagtaggcatgaaagaggcccggttggcattggccggtgttactttaatacattttccagtgttccctgtatctgggcatggtgctgagtggtggtgcgttagtgttctcatctgtagccccattgggtagatagaatgcctgtatatattctagttgtcataaaatatttattgagcaccagtggtacagtggctgtgatagcctccataaatagtccacataacctatctcggtagacatttgtggaaaactaatgctccacatgtgttaggaatatagataaggtatacagcttctctgctgtgtattcctgtctttaagtagccttcagatttgcatgtcacataataaagaggattgatcctcacagtgtctgtgatgcaagtacgttgggaatactacaagatcacttttgaaataaggcacttggggagtatgccagctgtaaaattacattttatgctttatttctaaaagcagtttgagctgtgccagttcaaagcctctgaaagcagagttgacacttagaggagaaaagaatctcaagtagagaaattgtatgacttgagagaaacagactctatcaaagggaactctcttaaaagccttttgataaaatcagtgatattatttgacaaataaattcactttgacatttaaaggataattggttttaggtataaaatgggactcagaagtactaattccctttaaaagtgctggattcccttcctttcagatacaagtgtgtttgttttttcttaattggaagtaaaactagaaaccagcagagttaaaaaaaaaaaaaagtgtatatgtaacatgaaatcagtatttagacttcttaggggactattccatgaagctattgcttgatttttcaggttattcacatctgctgaagaaacattttcacactgtaagtctgagcatcagtttaatattgacagcatggttcataaacatggtgagtagtttttagaataaaggcaatttaatttgtgaaatttgggc

SEQ ID NO: 96167 - DNA, 14848 bp, Homo sapiens
ttggtttggaaactatccatgttgtcaaccttaatgaagggattctcaaacttcaggtacctgttaaaatgcagatcccctatgtgttgggtggggaccccacactcatattttaataagcttcccaggtgattctgatacaggtgggccttcaactgtcttttggcctgtgaatgttttgattctattgttgcatgtctctgacaggtgcagacactatgctacactacacaaaacttccctgagcaagtggttaaatacacaactagatgcagaaagggcgatcatgagcaggtaacaggattttcagggcttcgtgatccccagtatgcggtttatagcatttctaagtaggagatctaccaggaaaatgaagtggaagtggaagagagagttttaaagagattgcagagattactcttctagtaatggtgatcctataaatacagtccatacagatttggactgtaacatattacatctttgagaacagtagttctcaaacgggggtaattttacacagaggtcatttggcaatgtctggagacatttctggtagtcatagccgtatgtgtgcgtgtgtgtatgctgtgggcatctagtgggtagaggcctgggatgttgctaaagaccctacaatgcacaggacagccttcataatggagaactaactggtccaaaatatcaatagtgcgaaggtgagaaatcttgctctagaggagctggttccaagatgtgaggactctggggacaacaggggttaaaagaacaatcaattcatccacctctccacttataattttttttttttttccaagacggagtttcgttcttattgcccaggctggagtgcaatggtgtgatctcggctcattgcaacctctgcctcctgggttcaagcaattctcctgcctcggcctcctgagtagctgggattacaggtgcccgtcatcacgcccagctcattttttgtagttttagtagaaatggggtttgatcatgtcggccaggctggtctcaaactcctgacctcaggtgatccatccgcctcggcctccccaagtgctgggattataagcgtgagccaccgcgcctggcatccacttacaatttcttacaggccaggaggccctgtggctatggagatgaataacccatactcctgctcttcaaaaacatataatcggatagtttacaataattacagaatgctacattagcaaggttgtacactagaatctctcagaggtactcactgaaataggattcccaggctccacagacctatcaagtcagactctccagtgaaggggtcaataagcctctctggtttttcggggtcctgtgctggagattctgtttcagtgatggggaggtgaggggggctgtcagagggacaatatgaagatcggtctgactggggctagaagggctgtcaacgggtacaagcaagaagtattccaggcagagagattatcatgtgcagatacagccactgacctttctaggtgaatctactcacacatctgagtacccagttctccatcagtaactccagaaatgtactggattaaaagcagaggaaaagcaaaggccaagaaaatgtttcccaaaaaaggaagcagaaagcccgccatatggggacaaggttttagggcagcctatgatacttggcaacaatatcctcataagaagttaatcttttaccagatgtaattagcaacccatcatttaccatcatttcccagttgctcctgcactttctcaaagtccgatccgcctaccactccgattttgatcttctgcctcaatttttgtaggaagtcatccatttctttggtaattttctaaatttcaagaaagaaaatacaacagtcataagccacacaataatcaggagaccaaaactctaagggtaacacaagtacataagtcttattttcttatttaaaaattaaagaaaaaatttttttttgagatagggtctcacttgtcacccaagctggagtgcagtggcatggtcatagctcatcgcagcctcgacctccctggactccggtgatcctcctatctctgcctcctgagtagctgggaccatagttatgtgccagcacacctggctaatttttttatattttgtagagacaaagttttgccatgttgcccaggccagtctggaactcctgggttcaggagatccaccagccttggcctcccaaagtgctgagattacaggtataagccaggtctataagccttattttcatacatgccaattaagttaccagctctgtacatagttcaaatattttagttgtaactgggggggcatctttaccagaataaacttaagtgttatttttaccaaattttaaacacaggtaatatgttagtagctgttgtgcactgtcccagctatttttctatgcatttatatacccatctatgggcacatatacaaataggtcttatttttgaaacataaatggaatcatgtcctgtgcagggactttggtttttcagcactatgctgtggtgatcttttcatgccaacacagatctagctcatcattccttttaaatgctacactatactccatttatggatttaagttgttgattttaaaataaaacaacataatgaaattaaagaggaagcttagggccagacatggaggctcatgcctgtaatcccggcactttaggaggccgaggcgggtggatcacctgaggtcagagttcgagatcagcctggccaacgtggcgaaaccctgtctctattaaaaatacaaaaattaggcgggcgcgctggtgggcgcctgtagtcccagctactcgggaggctgaggcaggagaatcacttgaacccgggagtcagaggttgcagtgagccaagatcgtgccactgcactccagcctgggtcacagagcgagacttcgtctcaaaacaaaacaaaacaaaacaaaaaaaaaaaaaaaggagaagcttagaattgattttattgcaatcacccaaaacaaaacaaaaatgtaaaagagtaagataactagattttttagtctcttctaaaagcaaagctcctatctagaaagagtggtcttagtggtataatcttatggtaaattccaaactgtgtgataattttaaaaaagttataaactaagatgaaaaaatagccctacattaagacacatcacaatgtatttttacaagtcttataactcagcactttgagcaatctcagttgtacatttacactgaatgtctttttttttttttttttgacacgaagtcgtgctctgtcacccaggctggagtgcaatggtgtggtctcggctcattgcaacctccacttcctgggttcaagcgattctcctgtctcagcctcccaggtagccaggattacaggcgcccgccatcatgctcggctaatctttttgtatttttagtagagactgggtttcaccatgttggcaaggctggtctcgaactcctgacctcaagtgatccacccgcctcagcctccccaagtgctgggattataggcatgaactaccgtgcccggctgaatatctttttactagaaatttagaaaatacaaaaaaccatttaattcaacctcagtatataaacacttggagttcaatgatttttctttaaaaaacttttttagagtaatacatgaatgtgattaaaattgtacagaagggtttgtaatagagtgcaatcttttctactctcacagtggaatctggacctattagacagaatctagaattggaggagtggcctttaaaagtcagaacacggtggctcacgcctgtaatcccagcactttgggaggccgaggcgggtggatcacgaggtccagagatagagaccatcctggccaacacagtgaaaccccatctctactaaaaatacaaaaattagccaggcgtggtggtgcctgcctgtagcaccagctacttggttgcctgaggcaggagaattgcttgaacctgggaggtggaggttgcagtgaactgagattgggccactacactccagtctggtgacagagtgagactctgtcttaaaaaaaaaaaaagagtcagaactgtgaaaatcagaaaatcagaagcactttcctgaatggcatacccagtgactagaacagcttccaccttagcacagataggaaatggcaaacttgacaggaaccaatatcctgaggcccagagacttgtaccaggttggctgtgtgaaactgaggaggttagttcttcactgagtgtgtttccttatgtttaaaacggtaataacaactatcctacctgggaagaaagatggaggaaggttgagagggttcagtgatatgaaaaagggtggcaatgtaaaccctagaccactatggcccacagaccacattgggcagctgtttgtttttgtaataaataaataaaattttattggtacacagccactcttatttatatagggtttatggctggttttgcactaaagttgagtggttactatagaccacatagtcagcaaagacagagaagtatttgctatatggccctttacaaaaaatgaattggggaccggagttttagaccactatgggcttttaacaaacccaagtgtgtgatcactgaatttcagaatcagaaaaagcctttgaagaacttgggagttgagcgtcatcactaggtaaatcaaacctgtggctgagaagggcaaaatgatacgtctaaggtcacacgcatttgacctggacttctggagcacaccattgttaccaccaagcgaaaactatgaggggtgagggtagaagctgaggatagtgagaccattggggtccagtctcaagttgaaatggccagtgttcagtggccaatttctgaaaaggggccaggagagcctcacctcaaggctgatcgtaactgaaacttatctgtgcctgtagcagcaaaatctgaaagtggaaagcaagtttccaagggcccaaagaggctctcagcgggcagcctgtaataacctagggctcctccatctccctagtccattgcaggggctggagatgggtgtggtggaggtggctactatttactgaggcctagtgtgttgtgtccaacatactttcaagaacttacacaatctcatttgatcctcacagacaccatatggaacaggtaacatccccatttaaagctgtagatgttgaggctcagagaggttaatgactcgctgaaggtcacacagatgtcaagaggtgaagatgagactccactaggtcggtttgacctggaaacctgtttttaatatcatgactcacggcacagcccattggttacaggattggggccggcacatagctgataagggggcctgatcttgggttgaaatcctggtctatcagtcccgagcactagcggtgagtccagattacattttccaacctagcacaagtttcctgctcttaagagttcttcagccccgtctcatctttccaagcaccagagctcttcaagagctggttagggcctccctctcattcctccagtgcacccagaatagggttcagcgccgtgaggacgtaggcggtccttagccaccccttggcgcctaccctgggtggtcgatagccccaactgggaacagcacgggctccgcgtcggctgccagcagcccgccggccgccacttacctgccgcggggcggtgagggtcccatccacgtcgaagaggcagagcgctgggccaggcgctgccatgtccccagtttctagccgcaccttacaagacacgttggcacgaggaactcggcccggaacttccgggttcggccgctgagtcgcagggcacgtcgggaagaggaggggactccgttcccataacgcctgggagtagcggcagccacgattcctggaccgcaactcccagggtgcaacgcagatcacgcccgccttgtacattcgagcatgcgctcttaggggttccgggggccggtgggatttacttccggcagcaggtggtggggccatggtaaggaggcgggtggcgagccttgarkgggtgatgctctttggggtcggggtcagggctggggcgggcaggcccgacgctcgggtttcggactccgaggatccgtgggaggaagctctggcgtgtgttacagttcgcttttcccgggctttctctgccctccttgggtcacatgcgcacagtagtagtagctaaaactcgccgagctctcacagtgcattaggtactaagttgaggactctgaaaccatcctctggttcactgtcttctgagtccccattttgaaaggcgaagaaaccgaatctcaggggtgtggagtaatttgctcacaaattactgttggagccagaattggaataagagcttttactgcttcactacccacctagtaatacccttgtgctacgtgttggggyctccctgcctcgctccttctccttctccgctgtttccccttccccagactaggctaagagaaagcagcagttccctccagcacccaagatagcatatgaatcaaacagagaattagaaagtttattggaataaatatctcacagatttgttgctcgagttccccactaagacactgattatttagtttcctgcttggggaaatgttcacacccccttgtggatacattgtccagcccagagtttgtcctccctggatatgttttgaattaatgacggccgcacctcctttcctgtatttatttggaattgcctggtggaaggaggactctgctgcactcactgactgtgtgatctttggtaaatatcttaccctctctgggcttagtttccctagtggtaaagtggaaatagtgataactatcttagatagctgttgtgatgcccacatgagatagcatctggctttacccttccctygtctggcaataacggttaccttgcaggattggcagaagccttagagtatggtgctttgcagatgttcaccgtgtgattaatgtggttgagttccatgagagaaatggtctactgtctccctttcaggctgcccttctccgagctgtgcgtaggtttcggggaaaagctgtgtgggaaaggcctctccatgggctgtggtgctgcagtgggcaggaggatcctaagaggtgggtgggcagcagttcacccatctcgaaggagaaactaccaaacgcagagactgagaaattctggatgttttaccgttttgatgccatcagaaccttcgggttcctgtcacgactgaagttggcacagactgccctgacagtggtagctttgccaccaggctattacttgtactcccagggcctcctcactctcaacaccgtgtgcctcatgagtgggatatcgggctttgccctgaccatgctgtgctggatgagctatttcttacggagactggttggtatcctgtatctgaatgagtctggcaccatgctgcgggtggcccatctgaacttctggggctggcggcaggacacatactgtcccatggcagatgtgattcccctgacagaaaccaaggaccggcctcaggagatgtttgtgcgtatccagcggtacagtgggaaacagaccttctacgtcaccctgcgctatggacgcatcctggacagagagcgtttcayacaggtgtttggggtacatcagatgctcaagtgaacaactgggacctggacctctgggtaaccctgggtcgcctggattaacaggaaggctgagggtgtgggcaaggctgaagaaaggggactgggtacttggagactttgcctgggcccctgggarcatgtgttttgtggtgaataaattcacaaggcaagagctggtgtacaggtttaggaaraaggctctaagcaagttcttacagcacttgtttgtgacattcagtcagataatggccagaagtttttgttaagagccagttcttagaagaacctrtgccaaggtcacccatagagtccattggtgtgaaagagaaaggcaaagaggtgtggcgggggagcrtaagatttggagtcagaagtctcagttctgtcatttgtcctggagcaggttattgagtctctttgaatcttggttttcacatctgtaaaatggaaagtcctgcttgtttcatgggatgggtgtgggaataaacaataaatgtcaaacgtgtggcagactcaacagcctacagcagatattattaagcatttggtcagaggttttagcagggagaaaggcttcgagcagtcagcagggacttccagagccctgtgctgtgcccctcacatatccagcggcagaarggtctgtcaggatgttaactacacattgacsagcagatgtcgtccaggtaggcacgaaaccccagttgagatttgttcaccacccagaggtctagaggctcttgctttggatggccctgcagtgtaataaagccaaatgcaccggatgctggtacgttattttataaacttaagccagttatatacattgccccacataattaataatatatgttcattatacaatttgtaacacagtaaagaggaaggaaggcatgatctttattattttgccactcgaaagtcaataagaatgttttatcgctgggggcggtggctcacacctgtaatcccagcacgttgggaggtcaaggtggcggatcacgaggtcaggagatcgaggccatcctcgctaacagggtgaaaccgtgtctccactaaaaaatacaaaaaaattagctgggcgtggtggcaggtgcctgtagtcccagctactcgggaggctgaggcaggacaatggtgtgaacctgggaggcggagtttgcagtgagccgagatcacgccactgcactccagcctgggcgacagagtgagactccgtctcaaaaaaaaaatatttttttttattgtgtagccttccatttttcttaaccataccaagatacacctaacaaatttatccttttaatcatttttaagtgtgcaattcagggacattaagtatattaacaatgttgtacaggctgggcacactgtctcatgcctgtaatcccagcactttgggaggctgaggcgtgtggatcacttgaagtcaggagttcaagaccagcctggccaacatggcaaaaccctgtctctactgaaaatacaaaaattagctgggcatggtggtgggcacttgtattcccagctacttgagaagcttgaacccgggaggcagaggttgcagtgagccgagattgcaccaatgcactccagcctgggagacagccagactatctcaaaaacaaacaaaacaaaaaatgttgtacaaccgtcaccaccatctatttccagaacattttcattatcccaaacagaactaatatacccattgagcaataatttccttctttttccagcccttggcaaccactaacctgctttctgtccctctggattcacctgttctggatatttcatataaatggaatcatacaatatgtgaccctttgtatctggctcttttttttttttttttttgagttgaagtctcgctctgtttcccaggccagagagcagtggcgcgatgtccactcactgcaacttccgcctcaccagctcaaatgattctgcctcagcctcccaagtagctgggattataggtgcctgacgccaagcctggctaatttttgtatttttagtagagatggggtttcaccatgttgtccaggctgacctggaatctctgacctcaagtgatcacccacctcggcctcccacagtgctgggattataggcgtgagccagtgcggctggcctgtatctggcttctttgacttggtgtagtgttgtcaaggtgcatccgtgttgtagcatatgtcagtgctatttcttttttatggttaaatatatttacgggtgcagtgtgtattctctgtgtgtgccacattttgtttgtccatctgttgatggacatttgagttgtcgtcaccttttgactactgatgaatgaacatttggctattgctgtgaacactggtatacgagtatctgtttgagtccctgctttcagttgttttgggtacgtactgagaagtggattaactggatcctgtggtaattctgtttatttttgaggacctgccacttttccacagcagctgtaccattttacattctcaccagcaacagacaagggttcctgtttctctacattcttgtcaacagtggttacttttccttttttttaaatttgagatggagtcttactctgtcacccagactgggttgcagtggtgtgatcttggctcactgcagactccgcctctcaggttcaagcgattctcctgcctcagcctcctgagtagctgggattacaggcacccaccaccatgcccagctaatttttctgcttttagtagagatgtggttttgccatgttggccagactggtctcgaactcctgaactcgagggatccacctgcctcggcctcccaaagtgctgggattacaggtatgagccaccacgcctggcccttcacttcgatgcttctgtcctgtgcttccatccttgctttacttgagtccgtttttgcagctgtcaaagtgatgcttaaaaacagaatcacgtcactctgctgtgaaggctgatggcctaatccaccctccccttccctccctcatccgcacctctgtggagatcattcccccaggtcacgactgccttgctgttctccagtaatcgagaatattccagccttaaggcctttgcattgacagttccctctgcctggaaggctttctccctagatgcctgcaaagagaactaaccgcctccccttcagtatcctctcggtataacagggttttactatttatgctcaagaagtgtagtgaagattcaattatatagaagagacatgtgcatagcagttacacgtggctgttcattccttctgtaccttgccttcacctgcctgtcagttccttcagtgactgtgactcccttccccatgaagagataaagcctgtggctaaaaaatgtcttaagaagtcataatgatttgaccttaacctcattaaaaccaaaaattctctctgttgggttgtaagtaatgacctgagtgagcctcaccccaggatattctgattatgtctggggtggatttccaggatctgtttttttgaccagcttgaagccaattctgagattcaggcaggctgggaatttctgaaatacattactagaacagaagacaccagagtgacacatggttctgtggactttgtgttcctgggccaattttctgcccaaagaataggttcttaacactggctttatgtgtagaatctcctggagagtgttttaaaaaccccattgtcgaagcccatgaccaggcatttttattttcacggttccctgggtgattctaacatggttgaccatcgctgcctttggagaatcaccactctgttaagtctgcaaggggcttgccctgggaggtgagaccagattctcacccatgcaggcattccatgtgtggtctgctcatgcagtaccagcagagggcacacagagcaaatgcattattctaacgctgtatccctaagctaaaatcacagatgtccaccagataacaggaaatgtgttagggcttctgtcatgcaccagtagggtagtacctgagagctgcccccaaaaaaccaaagtcaacaacagaagcaataaaaggactggtgcagtggctcacacctgtaatcccaactctttgggaggccaaggtgggcagatcgcttgagaccagaagttcaagaccagcctgggcaacatggtgaaaccccatctctactaaaaatgtgaaaaattagctgggtgtagggtacatgcctgtactcccagctactggggaggctgaggtgagaagatcacttgagcctgaggggcagaggttgcagtgagctgagactgcgccactgcactgcagcctgggtgacagagcgggatcctgtctcaaaaaacaaaaaaaacattaagtgtgcccaacccttgttgaatctggtagaacctgggcatctgtttgtttatgcttcccaggttattccacagtactacaagttttgagaatcacccaaagccatacaatagatggcaaagcagcttctcagaaaatgggagttgtctttagatttgggtggtagatatattggcagttgccccctttaacaacaattataacatgattgtcttagttcacttgggctgctgtaacaaaaataccgtaggctggatggctcaagcaacattaatttttacagttctggaggctgggaaatccaagattaatgcgtcagcgggttcattgtctaggagggcctgtttcctggttggtagacaggcttattcctgctgtggtctcccatggcaaaagaggtgagggagctctctgaaattttttatagggcactaatcccattcatgagggatccaccctcatgacctaatccacttccaaagttcccatctccagatatcatcacattggaaattaggtttcaacatatgaatttgggggtgacataaacattcagaatatagcaataatctaacagaaatactgaagtgtacatataaggatgttgactgaaatatttccaatagcaaaaaaactagtccgggcatgatggctcatgccagtaatcccagcactttgggaagctgaggtggaaggatcgcttgagaccaggagttcgaaaccagcccggtcaacatagtgaaaccccatctctacaaaagaaaaaataaaacattagctggatatggtggcacatgcctgtagtcctagctacttgggaggctgaggcaggagaattgtttgagcccggaagttcaaggctgcagtgagccatcactgtgccactgcactctagcctgggtgacagagtgagaccctgtctcaataaataaataagaaaagtaaaaactgggaataatctaagtttccattagtaggccacatggttaagtaaatgttggtagattaatattgtagtatacatgcaacctttaaaaagagtgagattgtactgtatctgtggaaaagaccacgaggtaggtagtgaaaaaaaaaaagcaagtcacagaacagtgtagttctgtgtgatcttatttgtgtttttaaaaagtacatgttggccaggtgcagtggctgtaatcccagcactttgggatgctgaggcaggtggatgacttgaggtcaggagttcgagaccagcctggtcaacatggtgaaaccccatctctactcaaaatacaaaaattagctgggggtggtgtcagacgcctgtaatctcagctactcaggaggctgaggcaggagaattgcttgaacccaggaggcagagattgcagtgagcggagatcgcaacatctcactccagcctgggctacagtgtgagactccatctcaaatacatacatacatacatacattgcaaattgtgaagagtggctacccccgggagaggattgagggtgagaggggtataatgagcacatcattcatcctagcaaatgaagaaaaacgctgtaataaacagtctgttcttccattcccttctcctcccaccagctttctaggcaaaggaaagtttctcaaccatgaattccaattctggactcagaagctgagtagatggaaggaaacatgcagtctttgaaaactcagttaaagcagctgtgatttaaccatgtttgtcccttgtcaagtggctttccttcttgtctggattttgcccccgtctccctgccatgctgtggccatgtaaataatttagatgcctagggtggtctggagcatgtccgttttatttttttgtttttcgagacagagtcttgctctgtcgcccaggctgaagtgcacaggtgtgatctcggctcactgcaacctctgcctcccggggatcaagccattctcctgccttagcctcccaaggagctggggttacaggcacccaccaccacgccggctaatttttgtatttttagtagagacggggtttcaccatggtgtccaggctggtcttgaactcctgacctcatgatccacctgcctcagcctcccaaagttctgggattacaggcgtgagccactgggtctggcctgtttttctgtttgtttgtttgtttgtttgttttaagatggatcctcgctctgtcacccagtctacagtgcagtggtgcaatctcagctcactgcaacctctgcctcctgggttcaagtgattctctgcctcagcctcctgagtagctggggttacaggcgcacgccaccacgctcagccaatttttgtatttttagtagggacagggtttcaccacgttggccaggatggtttcaaactcctggcctcaagtgatcggcccaccttggcctcccaaagggtggggattacaggcgtgagctactgtgcccagccacatgtcagttttcatatggccaccatccacacatgaggtctgcatcaactggggacctggtgacgatgctcccagtgtgcacgtgggaagcacagcccagtggtagctgttgtcctccttcctatgctggttaccaaaaatgagacttaccttgtcatagggccagatgtctatggcatccgccacccaatcattgcataaccatgtttaatgcgctccccaaagcagatctggtgggctgagcagcttgcaggggacagcctggatgaattgcctggagaactagagttgggagcttgctttatgttgctgctttatgactgcaagactcgtgagttcctaaatagaaagcaacagggtccctttgaactc
